(19) United States
(12) Patent Application Publication
(10) Pub. No.: US 2004/0018514 A1
(43) Pub. Date: Jan. 29, 2004

(54) Listeria inocua, genome and applications

(76) Inventors: Frederik Kunst, Ivry Sur Seine (FR); Philippe Glaser, Paris (FR)

Correspondence Address: FINNEGAN, HENDERSON, FARABOW, GARRETT & DUNNER, LLP, 1300 I STREET, NW, WASHINGTON, DC, 20005, US

(21) Appl. No.: 10/398,221

(22) PCT Filed: Oct. 4, 2001
(86) PCT No.: PCT/FR01/03061

(30) Foreign Application Priority Data
Oct. 4, 2000 (FR) 00/12697

(51) Int. Cl. C12Q 1/68; A61K 31/00; G06F 19/00; G01N 33/48; G01N 33/50; C07H 21/04; C12N 1/21; C12N 15/74

(52) U.S. Cl. 435/6; 536/23.7; 702/20; 435/252.3; 435/320.1; 514/1

(57) ABSTRACT

The invention concerns a nucleotide sequence derived from Listeria inocua corresponding to a sequence selected among SEQ ID NO: 1 to SEQ ID NO: 11 and the comparative analysis of said genome with that of Listeria monocytogenes.

[0001] The invention relates to a method for demonstrating the nucleotide sequences specific for the genome of a strain of bacterium of the genus Listeria, in particular of a strain of L. innocua or L. monocytogenes. The present invention also relates to the genomic sequence and to nucleotide sequences encoding polypeptides of Listeria innocua, such as cell envelope polypeptides secreted polypeptides or specific polypeptides or polypeptides involved in metabolism and in the replication process, and also to vectors including said sequences and to cells or animals transformed with these vectors. The invention also relates to the comparison of these nucleotide sequences with those encoding the polypeptides of Listeria monocytogenes, strain EGDe or L. monocytogenes 4b, and also the nucleotide sequences specific to these strains of Listeria. The invention also relates to methods for detecting these nucleic acids or polypeptides and kits for diagnosing contamination with bacteria of the genus Listeria and kits for typing contaminating strains. The invention is also directed toward a method for selecting compounds capable of modulating the bacterial infection engendered by other Listeria, and a method of biosynthesis or biodegradation of molecules of interest using said nucleotide sequences or said polypeptides. Finally, the invention comprises pharmaceutical, in particular vaccine, compositions for preventing and/or treating bacterial infections, in particular infections with Listeria, in particular monocytogenes, and compositions containing antibodies directed against polypeptides specific for L. innocua or for L. monocytogenes, strain EGDe or L. monocytogenes 4b.

[0002] In Listeria infections, Listeria monocytogenes is the most common and the most dangerous. Listeria monocytogenes is a facultative intracellular pathogen. It is the etiological agent of listeriosis, a food-related infection which poses increasingly great public health problems, with a considerable economic impact for the food industry. Listeriosis is the most lethal food-related infection (approximately 30% mortality). Listeria monocytogenes has the unusual property of being able to cross three barriers: the intestinal barrier, the blood-brain barrier and the placental barrier. Clinical manifestations of listeriosis include meningitis, meningoencephalitis, abortions and septicemia. This infection is opportunistic and affects mainly pregnant women, babies, elderly individuals and immunodepressed individuals, in particular individuals suffering from AIDS. This disease also affects healthy individuals and is responsible for a considerable amount of epidemics due to contaminated food products. Listeria monocytogenes is also important in veterinary terms, with a main risk for members of the sheep family and bovines. Listeria monocytogenes is particularly resistant to stress or to extreme conditions and it is important to search for its presence with care, not only for food safety problems but also for environmental safety problems.

[0003] Following the discovery of a contamination, it is necessary to type the strain(s) isolated in order to identify the origin of the contamination. Moreover, when the same installation is contaminated by two successive events, it is important to show with certainty whether these are two independent contaminations or whether the same strain is responsible for these two events. The most effective method currently used, the pulsed field gel electrophoresis (PFGE) profile after digestion of the chromosomal DNA, is a very laborious method which cannot be carried out systematically. An alternative method, less effective but automated, ribotyping, is very expensive per analysis, which limits its use.

[0004] It should also be underlined that the risk of listeriosis is very variable depending on the contaminating strain of Listeria. In extreme terms, some strains might be considered to be dangerous and others innocuous (such as Listeria innocua). Thus, although contaminations with Listeria are very common, the number of cases described is small. In this perspective, the availability of a tool for identifying the risk associated with a contamination (as a function of the genomic type of strain and of the number of bacteria per gram of food) would allow industrial companies to react as a function of this risk.

[0005] The complete sequence of the Listeria monocytogenes genome has been established for the strain EGDe deposited with the CNCM under the No. I-2440 on Apr. 11, 2000, and described in French patent application No. 00 04629 filed on Apr. 11, 2000. The genome of this bacterium is circular and comprises approximately 3 000 kilobases. Its GC content is approximately 38%. Virulence factor studies have made it possible to identify a 15 kb locus which can be considered to be a pathogenicity island insofar as it contains most of the genes whose function in virulence has been clearly identified.

[0006] A subject of the present invention is thus a method for demonstrating nucleotide sequences specific for the genome of a strain of bacterium of the genus Listeria, in particular specific for a strain of L. innocua or L. monocytogenes, such as the strain L. monocytogenes EGDe or L. monocytogenes 4b.

[0007] Such a method according to the invention in particular makes it possible to identify sequences specific for:

[0008] L. innocua compared to L. monocytogenes, in particular compared to L. monocytogenes EGDe and/or L. monocytogenes 4b;

[0009] L. monocytogenes, in particular L. monocytogenes EGDe or L. monocytogenes 4b, compared to L. innocua;

[0010] L. monocytogenes EGDe compared to L. innocua and/or L. monocytogenes 4b; and

[0011] L. monocytogenes 4b compared to L. innocua and/or L. monocytogenes EGDe.

[0012] Said method according to the invention is preferably characterized in that it comprises at least the following steps:

[0013] a) aligning the nucleotide sequences of L. monocytogenes, in particular those of L. monocytogenes EGDe and/or L. monocytogenes 4b, and those of L. innocua according to the invention; and

[0014] b) processing the data obtained with this alignment in order to isolate said specific sequences.

[0015] In a preferred embodiment, the method according to the invention is characterized in that the nucleotide sequences of L. monocytogenes, in particular those of L. monocytogenes EGDe and/or L. monocytogenes 4b, are chosen from the genomic nucleotide sequences:

[0016] as described in French patent application No. 00 04629 filed on Apr. 11, 2000, or in international patent application PCT/FR 01/01118 filed on Apr. 11, 2001 for L. monocytogenes EGDe, in particular the sequence SEQ ID No. 1 of the complete genome of L. monocytogenes EGDe; and

[0017] the sequences SEQ ID Nos. 1068 to 2041 or Nos. 2872 to 3891 for L. monocytogenes 4b.

[0018] In an embodiment which is also preferred, the method according to the invention is characterized in that the nucleotide sequences specific for L. innocua or L. monocytogenes, in particular those for L. monocytogenes EGDe and/or L. monocytogenes 4b, hybridize, under high stringency conditions, with respectively the nucleotide sequences, or the sequence complementary thereto, of L. innocua or L. monocytogenes, in particular those of L. monocytogenes EGDe and/or L. monocytogenes 4b.

[0019] The present invention relates to the nucleotide sequences and polypeptides of Listeria innocua and the comparison of the corresponding sequences with those of Listeria monocytogenes strain EGDe and/or 4b.

[0020] The invention relates in particular to:

[0021] the nucleic acid sequences SEQ ID Nos. 12 to 689 (cf. table V) and SEQ ID Nos. 2059 to 2601 (cf. table VI), in particular SEQ ID Nos. 2059 to 2601, specific for Listeria innocua compared to Listeria monocytogenes strain EGDe;

[0022] the nucleic acid sequences SEQ ID Nos. 690 to 1067 (cf. table V) and SEQ ID Nos. 2602 to 2871 (cf. table VII), in particular SEQ ID Nos. 2602 to 2871, specific for Listeria monocytogenes strain EGDe compared to Listeria innocua;

[0023] the nucleic acid sequences SEQ ID Nos. 3892 to 4025 (cf. table IX) specific for Listeria monocytogenes 4b compared to Listeria innocua and Listeria monocytogenes strain EGDe,

[0024] their fragments of sufficient length to conserve their abovementioned specificity, the sequence complementary thereto, their specific primers or probes, the peptides encoded by these nucleic acid sequences or antibodies directed against these peptides, and also in particular their uses for identifying a strain of Listeria or for distinguishing between a pathogenic or nonpathogenic strain of Listeria in a biological sample, in particular using methods or a diagnostic kit as presented below or known to those skilled in the art.

[0025] Using these specific sequences according to the invention, those skilled in the art will be able to design the primers or probes, or to produce the specific peptides or the antibodies directed against these peptides, required to carry out these diagnostic methods or the development of a diagnostic kit, as presented below, or which are standard.

[0026] Thus, an object of the present invention is to disclose the complete sequence of the genome of Listeria innocua, in particular CLIP 11262 contained in the genomic library prepared from the genome of this strain and deposited with the CNCM on Oct. 2, 2000, under the number I-2565, and also of all the genes and noncoding regulatory sequences contained in said genome.

[0027] The strain CLIP 11262 was isolated from a dairy product. This strain is conserved at the Centre National de Référence des Listeria [National Listeria Reference Center] at the Pasteur Institute (WHO collaborating center).

[0028] Comparison of the complete sequences of the genomes of L. monocytogenes strain EGDe and Listeria innocua, strain CLIP 11262, shows that approximately 86% of these genomes is very highly conserved (80 to 95% DNA identity). On the other hand, the remaining 14% is specific for each strain. In practical terms, a chip representing all of the genes of each species would give a positive signal for the DNA of the two strains for 86% of the probes and for 14%, would give a signal only with the DNA of one of the two strains.

[0029] These results are in agreement with the data from the literature on the diversity of Listeria strains. Moreover, recent laboratory data on the sequencing of an epidemic strain of L. monocytogenes (serotype 4b (CLIP 80459)) confirm this diversity but especially show that the strains of serotype 4b are without doubt as close to L. innocua as to the strain of L. monocytogenes serotype 1/2a, the genome of which has been sequenced. The strain CLIP 80459 is an epidemic strain. It is conserved at the Centre National de Référence des Listeria [National Listeria Reference Center] of the Pasteur Institute (WHO collaborating center). It should also be underlined that the innocua strain is not pathogenic and, consequently, that the genes specific for L. monocytogenes are potentially involved in the pathogenicity. Moreover, analysis of the genome of the EGDe strain has made it possible to identify the main competence genes, i.e. the genes which promote horizontal gene transfers. Certain strains of Listeria should, consequently, have the ability to be transformed. Horizontal transfers between strains should thus be common and explain the great diversity observed between the isolates.

[0030] The strain Listeria monocytogenes serotype 4b is also interchangeably identified in the present application by Listeria monocytogenes 4b.

[0031] All of these observations indicate that the genes identified as being variable between L. monocytogenes strain EGDe and L. innocua should be representative of the genomic diversity of Listeria.

[0032] The invention also relates to novel tools for typing Listeria strains. These tools might be of the DNA “chip” type or of another type. The novel characteristics of these typing tools will be as follows:

[0033] rapidity and simplicity of use;

[0034] high capacity for discrimination between strains;

[0035] possibility of providing information on the genomic content of the strain analyzed and of making it possible optionally to predict the risk associated with a Listeria contamination.

[0036] The present invention therefore relates to a nucleotide sequence of Listeria innocua, characterized in that it corresponds to a sequence chosen from SEQ ID No. 1 to SEQ ID No. 11, SEQ ID No. 2057 and SEQ ID No. 2058, in particular from SEQ ID No. 2057 and SEQ ID No. 2058.

[0037] The present invention also relates to a nucleotide sequence derived from Listeria innocua, characterized in that it is chosen from:

[0038] a) a nucleotide sequence comprising at least 75%, 80%, 85%, 90%, 95% or 98% identity with a sequence chosen from SEQ ID No. 1 to SEQ ID No. 11, SEQ ID No. 2057 and SEQ ID No. 2058, in particular from SEQ ID No. 2057 and SEQ ID No. 2058;

[0039] b) a nucleotide sequence which hybridizes, under high stringency conditions, with a sequence chosen from SEQ ID No. 1 to SEQ ID No. 11, SEQ ID No. 2057 and SEQ ID No. 2058;

[0040] c) a nucleotide sequence complementary to a sequence chosen from SEQ ID No. 1 to SEQ ID No. 11, SEQ ID No. 2057 and SEQ ID No. 2058, or complementary to a nucleotide sequence as defined in a) or b), or a nucleotide sequence of the RNA corresponding to either of the sequences a) and b);

[0041] d) a nucleotide sequence of a representative fragment of a sequence chosen from SEQ ID No. 1 to SEQ ID No. 11, SEQ ID No. 2057 and SEQ ID No. 2058, or of a representative fragment of a nucleotide sequence as defined in a), b) or c);

[0042] e) a nucleotide sequence comprising a sequence as defined in a), b), c) or d); and

[0043] f) a nucleotide sequence as defined in a), b), c), d) or e) which has been modified.

[0044] More particularly, a subject of the present invention is also the nucleotide sequences characterized in that they are derived from SEQ ID No. 1 to SEQ ID No. 11, SEQ ID No. 2057 and SEQ ID No. 2058 and in that they encode a polypeptide, chosen from the sequences SEQ ID No. 12 to SEQ ID No. 689, SEQ ID No. 2053 to SEQ ID No. 2056 and SEQ ID No. 2059 to SEQ ID No. 2601, in particular from SEQ ID No. 2059 to SEQ ID No. 2601.

[0045] The present invention also relates, more generally, to the nucleotide sequences derived from SEQ ID No. 1 to SEQ ID No. 11, SEQ ID No. 2057 and SEQ ID No. 2058 and encoding a polypeptide of L. innocua, such as they may be isolated from SEQ ID No. 1 to SEQ ID No. 11, SEQ ID No. 2057 and SEQ ID No. 2058, in particular from SEQ ID No. 2057 and SEQ ID No. 2058.

[0046] In addition, the nucleotide sequences, characterized in that they comprise a nucleotide sequence chosen from:

[0047] a) a nucleotide sequence encoding a polypeptide, chosen from the sequences SEQ ID No. 12 to SEQ ID No. 689, SEQ ID No. 2053 to SEQ ID No. 2056 and SEQ ID No. 2059 to SEQ ID No. 2601, in particular from SEQ ID No. 2059 to SEQ ID No. 2601;

[0048] b) a nucleotide sequence comprising at least 75%, 80%, 85%, 90%, 95% or 98% identity with a nucleotide sequence encoding a polypeptide, chosen from the sequences SEQ ID No. 12 to SEQ ID No. 689, SEQ ID No. 2053 to SEQ ID No. 2056 and SEQ ID No. 2059 to SEQ ID No. 2601, in particular from SEQ ID No. 2059 to SEQ ID No. 2601;

[0049] c) a nucleotide sequence which hybridizes, under high stringency conditions, with a nucleotide sequence encoding a polypeptide, chosen from the sequences SEQ ID No. 12 to SEQ ID No. 689, SEQ ID No. 2053 to SEQ ID No. 2056 and SEQ ID No. 2059 to SEQ ID No. 2601, in particular from SEQ ID No. 2059 to SEQ ID No. 2601;

[0050] d) a complementary or RNA sequence corresponding to a sequence as defined in a), b) or c);

[0051] e) a nucleotide sequence of a representative fragment of a sequence as defined in a), b), c) or d); and

[0052] f) a sequence as defined in a), b), c), d) or e) which has been modified, are also subjects of the invention.

[0053] The present invention also relates to a nucleotide sequence of Listeria monocytogenes serotype 4b of sequence SEQ ID No. 1068 to SEQ ID No. 2041 and SEQ ID No. 2872 to SEQ ID No. 3891, in particular SEQ ID No. 2872 to SEQ ID No. 3891.

[0054] The present invention also relates to a nucleotide sequence of Listeria monocytogenes serotype 4b, characterized in that it is chosen from:

[0055] a) a nucleotide sequence comprising at least 75%, 80%, 85%, 90%, 95% or 98% identity with SEQ ID No. 1068 to SEQ ID No. 2041, SEQ ID No. 2872 to SEQ ID No. 3891, in particular with SEQ ID No. 2872 to SEQ ID No. 3891;

[0056] b) a nucleotide sequence which hybridizes, under high stringency conditions, with SEQ ID No. 1068 to SEQ ID No. 2041, SEQ ID No. 2872 to SEQ ID No. 3891, in particular with SEQ ID No. 2872 to SEQ ID No. 3891;

[0057] c) a nucleotide sequence complementary to SEQ ID No. 1068 to SEQ ID No. 2041, SEQ ID No. 2872 to SEQ ID No. 3891, in particular to SEQ ID No. 2872 to SEQ ID No. 3891, or complementary to a nucleotide sequence as defined in a) or b), or a nucleotide sequence of the RNA corresponding to either of the sequences a) and b);

[0058] d) a nucleotide sequence of a representative fragment of SEQ ID No. 1068 to SEQ ID No. 2041, SEQ ID No. 2872 to SEQ ID No. 3891, in particular of SEQ ID No. 2872 to SEQ ID No. 3891, or of a representative fragment of a nucleotide sequence as defined in a), b) or c);

[0059] e) a nucleotide sequence comprising a sequence as defined in a), b), c) or d); and

[0060] f) a nucleotide sequence as defined in a), b), c), d) or e) which has been modified.

[0061] More particularly, the subject of the present invention is also the nucleotide sequences characterized in that they are derived from SEQ ID No. 1068 to SEQ ID No. 2041, SEQ ID No. 2872 to SEQ ID No. 3891, in particular from SEQ ID No. 2872 to SEQ ID No. 3891, and in that they encode a polypeptide, chosen from the sequences SEQ ID No. 690 to SEQ ID No. 1067, SEQ ID No. 2049 to SEQ ID No. 2052 and SEQ ID No. 2602 to SEQ ID No. 2871, in particular from SEQ ID No. 2602 to SEQ ID No. 2871.

[0062] The present invention also relates, more generally, to the nucleotide sequences derived from SEQ ID No. 1068 to 2041, SEQ ID No. 2872 to SEQ ID No. 3891, in particular from SEQ ID No. 2872 to SEQ ID No. 3891, and encoding a polypeptide of L. monocytogenes, such as they may be isolated from SEQ ID No. 690 to 1067, SEQ ID No. 2049 to SEQ ID No. 2052 and SEQ ID No. 2602 to SEQ ID No. 2871, in particular from SEQ ID No. 2602 to SEQ ID No. 2871.

[0063] In addition, the nucleotide sequences characterized in that they comprise a nucleotide sequence chosen from:

[0064] a) a nucleotide sequence encoding a polypeptide, chosen from the sequences SEQ ID No. 690 to SEQ ID No. 1067, SEQ ID No. 2602 to SEQ ID No. 2871, in particular from SEQ ID No. 2602 to SEQ ID No. 2871;

[0065] b) a nucleotide sequence comprising at least 75%, 80%, 85%, 90%, 95% or 98% identity with a nucleotide sequence encoding a polypeptide, chosen from the sequences SEQ ID No. 690 to SEQ ID No. 1067, SEQ ID No. 2602 to SEQ ID No. 2871, in particular from SEQ ID No. 2602 to SEQ ID No. 2871;

[0066] c) a nucleotide sequence which hybridizes, under high stringency conditions, with a nucleotide sequence encoding a polypeptide, chosen from the sequences SEQ ID No. 690 to SEQ ID No. 1067, SEQ ID No. 2602 to SEQ ID No. 2871, in particular from SEQ ID No. 2602 to SEQ ID No. 2871;

[0067] d) a complementary or RNA nucleotide sequence corresponding to a sequence as defined in a), b) or c);

[0068] e) a nucleotide sequence of a representative fragment of a sequence as defined in a), b), c) or d); and

[0069] f) a sequence as defined in a), b), c), d) or e) which has been modified, are also subjects of the invention.

[0070] The terms “nucleic acid”, “nucleic acid sequence”, “polynucleotide”, “oligonucleotide”, “polynucleotide sequence” and “nucleotide sequence”, terms which will be used indifferently in the present description, are intended to denote a precise chain of nucleotides, which may or may not be modified, which makes it possible to define a fragment or region of a nucleic acid, which may or may not comprise unnatural nucleotides, and which may correspond equally to a double-stranded DNA, a single-stranded DNA and transcription products of said DNAs. Thus, the nucleic acid sequences according to the invention also encompass PNAs (Peptide Nucleic Acids).

[0071] It should be understood that the present invention does not concern the nucleotide sequences in their natural chromosomal environment, i.e. in the natural state. They are sequences which have been isolated and/or purified, i.e. they have been removed directly or indirectly, for example by copying, their environment having been at least partially modified. Nucleic acids obtained by chemical synthesis are thus also intended to be denoted.

[0072] For the purpose of the present invention, the term “percentage identity” between two nucleic acid or amino acid sequences is intended to denote a percentage of nucleotides or amino acid residues which are identical between the two sequences to be compared, obtained after the best alignment, this percentage being purely statistical and the differences between the two sequences being distributed randomly and throughout their length. The term “best alignment” or “optimal alignment” is intended to denote the alignment for which the percentage identity determined as below is the highest. Sequence comparisons between two nucleic acid or amino acid sequences are conventionally carried out by comparing these sequences after having optimally aligned them, said comparison being carried out by segment or by “window of comparison” in order to identify and compare local regions of sequence similarity. The optimal alignment of the sequences for the comparison may be carried out, besides manually, by means of the local homology algorithm of Smith and Waterman, (1981, Ad. App. Math. 2:482), by means of the local homology algorithm of Neddleman and Wunsch (1970, J. Mol. Biol. 48:443), by means of the similarity search method of Pearson and Lipman (1988, Proc. Natl. Acad. Sci. USA 85:2444), by means of computer software using these algorithms (GAP, BESTFIT, BLAST P, BLAST N, FASTA and TFASTA in the Wisconsin Genetics Software Package, Genetics Computer Group, 575 Science Drive, Madison, Wis.). In order to obtain the optimal alignment, the BLAST program is preferably used, with the BLOSUM 62 matrix. The PAM or PAM250 matrices can also be used.

[0073] The percentage identity between two nucleic acid or amino acid sequences is determined by comparing these two sequences, which have been optimally aligned, the nucleic acid or amino acid sequence to be compared possibly comprising additions or deletions with respect to the reference sequence for optimal alignment between these two sequences. The percentage identity is calculated by determining the number of identical positions for which the nucleotide or the amino acid residue is identical in the two sequences, dividing this number of identical positions by the total number of positions compared and multiplying the result obtained by 100 so as to obtain the percentage identity between these two sequences.

[0074] The expression “nucleic acid sequences exhibiting a percentage identity of at least 75%, preferably 80%, 85% or 90%, more preferably 95%, or even 98%, after optimal alignment with a reference sequence” is intended to denote the nucleic acid sequences exhibiting, with respect to the reference nucleic acid sequence, certain modifications, such as in particular a deletion, a truncation, an extension, a chimeric fusion and/or a substitution, in particular a point substitution, and the nucleic acid sequence of which exhibits at least 75%, preferably 80%, 85%, 90%, 95% or 98%, identity, after optimal alignment, with the reference nucleic acid sequence. They are preferably sequences whose complementary sequences are capable of hybridizing specifically with the reference sequences. Preferably, the specific or high stringency hybridization conditions will be such that they ensure at least 75%, preferably 80%, 85%, 90%, 95% or 98%, identity, after optimal alignment, between one of the two sequences and the sequence complementary thereto.

[0075] Hybridization under high stringency conditions means that the conditions of temperature and of ionic strength are chosen such that they allow the hybridization between two complementary DNA fragments to be maintained. By way of illustration, high stringency conditions in the hybridization step for the purposes of defining the polynucleotide fragments described above are advantageously as follows.

[0076] The DNA-DNA or DNA-RNA hybridization is carried out in two steps: (1) prehybridization at 42° C. for 3 hours in phosphate buffer (20 mM, pH 7.5) containing 5×SSC (1×SSC corresponds to a solution of 0.15 M NaCl+0.015 M sodium citrate), 50% of formamide, 7% of sodium dodecyl sulfate (SDS), 10× Denhardt's, 5% of dextran sulfate and 1% of salmon sperm DNA; (2) actual hybridization for 20 hours at a temperature which depends on the length of the probe (i.e.: 42° C. for a probe >100 nucleotides in length), followed by 2 washes for 20 minutes at 20° C. in 2×SSC+2% SDS, 1 wash for 20 minutes at 20° C. in 0.1×SSC+0.1% SDS. The final wash is carried out in 0.1×SSC+0.1% SDS for 30 minutes at 60° C. for a probe >100 nucleotides in length. The high stringency hybridization conditions described above for a polynucleotide of defined length can be adjusted by those skilled in the art for longer or shorter oligonucleotides, according to the teaching of Sambrook et al. (1989, Molecular cloning: a laboratory manual, 2^{nd} Ed. Cold Spring Harbor).

[0077] In addition, the expression “representative fragment of sequences according to the invention” is intended to denote any nucleotide fragment having at least 15 consecutive nucleotides, preferably at least 30, 75, 150, 300 and 450 consecutive nucleotides, of the sequence from which it is derived.

[0078] The term “representative fragment” is intended to mean in particular a nucleic acid sequence encoding a biologically active fragment of a polypeptide, as defined later.

[0079] The term “representative fragment” is also intended to mean the intergenic sequences, and in particular the nucleotide sequences carrying the regulatory signals (promoters, terminators, or even enhancers, etc.).

[0080] Among said representative fragments, preference is given to those having nucleotide sequences corresponding to open reading frames, called ORF sequences, generally included between an initiation codon and a stop codon, or between two stop codons, and encoding polypeptides, preferably of at least 100 amino acids, such as, for example, without being limited thereto, the ORF sequences which will be described subsequently.

[0081] The numbering of the ORF nucleotide sequences which will be used subsequently in the present description corresponds to the numbering of the amino acid sequences of the proteins encoded by said ORFs.

[0082] The representative fragments according to the invention can be obtained, for example, by specific amplification such as PCR or after digestion with suitable restriction enzymes of nucleotide sequences according to the invention, this method being described in particular in the work by Sambrook et al.. Said representative fragments can also be obtained by chemical synthesis when they are not too great in length, according to methods well known to those skilled in the art.

[0083] The sequences which are naturally framed by sequences which exhibit at least 75%, 80%, 85%, 90%, 95% or 98% identity with the sequences according to the invention are also intended to be included among the sequences containing sequences of the invention, or representative fragments.

[0084] The expression “nucleotide sequence which has been modified” is intended to mean any nucleotide sequence obtained by mutagenesis according to techniques well known to those skilled in the art, and comprising modifications compared to the normal sequences, for example mutations in the sequences regulating and/or promoting the expression of the polypeptide, in particular leading to a modification of the level of expression or of the activity of said polypeptide.

[0085] The expression “nucleotide sequence which has been modified” is also intended to mean any nucleotide sequence encoding a modified polypeptide as defined below.

[0086] The representative fragments according to the invention may also be probes or primers, which can be used in methods for detecting, identifying, assaying or amplifying nucleic acid sequences.

[0087] For the purpose of the invention, a probe or primer is defined as being a single-stranded fragment of nucleic acid or a denatured double-stranded fragment comprising, for example, from 12 bases to a few kb, in particular from 15 to a few hundred bases, preferably from 15 to 50 or 100 bases, and having a specificity of hybridization under given conditions so as to form a hybridization complex with a target nucleic acid.

[0088] The probes and primers according to the invention can be labeled directly or indirectly with a radioactive or nonradioactive compound using methods well known to those skilled in the art, in order to obtain a detectable and/or quantifiable signal (patent FR 78 10975 and bDNA of Chiron EP 225 807 and EP 510 085).

[0089] The unlabeled sequences of polynucleotides according to the invention can be used directly as a probe or primer.

[0090] The sequences are generally labeled so as to obtain sequences which can be used for many applications. The labeling of the primers or of the probes according to the invention is carried out with radioactive elements or with nonradioactive molecules.

[0091] Among the radioactive isotopes used, mention may be made of ³²P, ³³P, ³⁵S, ³H and 125I. The nonradioactive entities are selected from ligands such as biotin, avidin or streptavidin, digoxigenin, haptens, dyes and luminescent agents, such as radioluminescent, chemiluminescent, bioluminescent, fluorescent or phosphorescent agents.

[0092] The polynucleotides according to the invention can thus be used as a primer and/or probe in methods using in particular the PCR (polymerase chain reaction) technique (Rolfs et al., 1991, Berlin: Springer-Verlag). This technique requires the choice of pairs of oligonucleotide primers framing the fragment which must be amplified. Reference may, for example, be made to the technique described in U.S. Pat. No. 4,683,202. The amplified fragments can be identified, for example after agarose or polyacrylamide gel electrophoresis or after a chromatographic technique such as gel filtration or ion exchange chromatography, and then sequenced. The specificity of the amplification can be controlled using the nucleotide sequences of polynucleotides of the invention as matrix, plasmids containing these sequences or else the derived amplification products. The amplified nucleotide fragments can be used as reagents in hybridization reactions in order to demonstrate the presence, in a biological sample, of a target nucleic acid of sequence complementary to that of said amplified nucleotide fragments.

[0093] The invention is also directed toward the nucleic acids which can be obtained by amplification using primers according to the invention.

[0094] Other techniques for amplifying the target nucleic acid can advantageously be used as an alternative to a PCR (PCR-like) using a pair of primers of nucleotide sequences according to the invention. The term “PCR-like” is intended to denote all the methods using direct or indirect reproductions of nucleic acid sequences, or else in which the labeling systems have been amplified; these techniques are, of course, known. In general, this involves amplification of the DNA with a polymerase; when the sample of origin is an RNA, a reverse transcription should be carried out beforehand. A very large number of methods currently exist for this amplification, such as, for example, the SDA (Strand Displacement Amplification) technique (Walker et al., 1992, Nucleic Acids Res. 20:1691), the TAS (Transcription-based Amplification System) technique described by Kwoh et al. (1989, Proc. Natl. Acad. Sci. USA, 86, 1173), the 3SR (Self-Sustained Sequence Replication) technique described by Guatelli et al. (1990, Proc. Natl. Acad. Sci. USA, 87:1874), the NASBA (Nucleic Acid Sequence Based Amplification) technique described by Kievitis et al. (1991, J. Virol. Methods, 35, 273), the TMA (Transcription Mediated Amplification) technique, the LCR (Ligase Chain Reaction) technique described by Landegren et al. (1988, Science 241, 1077), the RCR (Repair Chain Reaction) technique described by Segev (1992, C. Kessler, Springer Verlag, Berlin, New-York, 197-205), the CPR (Cycling Probe Reaction) technique described by Duck et al. (1990, Biotechniques, 9, 142), and the Q-beta-replicase amplification technique described by Miele et al. (1983, J. Mol. Biol., 171, 281). Some of these techniques have since been improved.

[0095] When the target polynucleotide to be detected is an mRNA, an enzyme of the reverse transcriptase type is advantageously used, prior to carrying out an amplification reaction using the primers according to the invention or to carrying out a method of detection using the probes of the invention, in order to obtain a cDNA from the mRNA contained in the biological sample. The cDNA obtained will then be used as a target for the primers or the probes used in the method of amplification or of detection according to the invention.

[0096] The probe hybridization technique can be carried out in various ways (Matthews et al., 1988, Anal. Biochem., 169, 1-25). The most general method consists in immobilizing the nucleic acid extracted from the cells of various tissues or from cells in culture on a support (such as nitrocellulose, nylon or polystyrene) and in incubating, under well-defined conditions, the immobilized target nucleic acid with the probe. After hybridization, the excess probe is removed and the hybrid molecules formed are detected using the appropriate method (measuring the radioactivity, the fluorescence or the enzyme activity associated with the probe).

[0097] According to another embodiment of the nucleic acid probes according to the invention, the latter may be used as capture probes. In this case, a probe, termed “capture probe”, is immobilized on a support and is used to capture, by specific hybridization, the target nucleic acid obtained from the biological sample to be tested, and the target nucleic acid is then detected using a second probe, termed “detection probe”, labeled with a readily detectable element.

[0098] Among the advantageous nucleic acid fragments, mention should thus be made in particular of antisense oligonucleotides, i.e. oligonucleotides whose structure provides, by hybridization with the target sequence, inhibition of the expression of the corresponding product. Mention should also be made of sense oligonucleotides which, by interaction with proteins involved in regulating the expression of the corresponding product, will induce either an inhibition or an activation of this expression.

[0099] Preferably, the probes or primers according to the invention are immobilized on a support, covalently or noncovalently. In particular, the support may be a DNA chip or a high- or medium-density filter, which are also subjects of the present invention (patents WO 97/29212, WO 98/27317, WO 97/10365 and WO 92/10588).

[0100] The term “DNA chip” or “high density filter” is intended to mean a support to which are attached DNA sequences, each one of them being able to be pinpointed by its geographical location. These chips or filters differ mainly by their size, the material of the support and, optionally, the number of DNA sequences which are attached thereto.

[0101] The probes or primers according to the present invention can be attached to the solid supports, in particular DNA chips, by various methods of production. In particular, in situ synthesis can be carried out by photo-chemical addressing or by inkjet. Other techniques consist in carrying out an ex situ synthesis and attaching the probes to the support of the DNA chip by mechanical or electronic addressing or by inkjet. These various methods are well known to those skilled in the art.

[0102] A nucleotide sequence (probe or primer) according to the invention therefore makes it possible to detect and/or amplify specific nucleic acid sequences. In particular, the detection of these said sequences is facilitated when the probe is attached to a DNA chip or to a high density filter.

[0103] The use of DNA chips or high density filters in fact makes it possible to determine the gene expression in an organism having a genomic sequence close to L. monocytogenes or innocua, and to type the strain in question.

[0104] The genomic sequence of L. innocua and the partial sequences of L. monocytogenes 4b, completed by the identification of the genes of these organisms, as presented in the present invention, serve as a basis to construct these DNA chips or filters.

[0105] The preparation of these filters or chips consists in synthesizing oligonucleotides, corresponding to the 5′ and 3′ ends of the genes or to more internal fragments, in order to amplify fragments of an appropriate length, for example between approximately 300 and 800 bases. These oligonucleotides are chosen using the genomic sequence and its annotations disclosed by the present invention. The temperature of pairing of these oligonucleotides at the corresponding places on the DNA should be approximately the same for each oligonucleotide. This makes it possible to prepare DNA fragments corresponding to each gene using appropriate PCR conditions in a highly automated environment. The amplified fragments are then immobilized on filters or supports made of glass, silicon or synthetic polymers and these media are used for the hybridization.

[0106] The availability of such filters and/or chips and of the corresponding annotated genomic sequence makes it possible to study the expression of large sets, or even of all, of the genes in the microorganisms associated with Listeria innocua and L. monocytogenes 4b, by preparing the complementary DNAs and hybridizing them to the DNA or to the oligonucleotides immobilized on the filters or chips. Similarly, the filters and/or the chips make it possible to study the strain or species variability by preparing the DNA of these organisms and hybridizing it to the DNA or to the oligonucleotides immobilized on the filters or the chips.

[0107] The differences between the genomic sequences of the various strains or species can greatly affect the intensity of the hybridization and, consequently, disturb the interpretation of the results. It may therefore be necessary to have the precise sequence of the genes of the strain intended to be studied. The method for detecting the genes described later in detail, involving determining the sequence of random fragments of a genome and organizing them according to the sequence of the complete genome of L. innocua and L. monocytogenes 4b disclosed in the present invention will be very useful.

[0108] The nucleotide sequences according to the invention can be used in DNA chips to carry out mutation analysis. This analysis is based on constituting chips capable of analyzing each base of a nucleotide sequence according to the invention. For this purpose, use may in particular be made of the techniques of microsequencing on a DNA chip. The mutations are detected by extension of immobilized primers which hybridize to the matrix of the sequences analyzed, just at a position adjacent to that of the mutated nucleotide sought. A single-stranded, RNA or DNA matrix of the sequences to be analyzed will be advantageously prepared according to conventional methods, using products amplified according to PCR-type techniques. The single-stranded DNA or RNA matrices thus obtained are then deposited onto the DNA chip, under conditions which allow their specific hybridization to the immobilized primers. A thermostable polymerase, for example Tth or Taq DNA polymerase, specifically extends the 3′ end of the immobilized primer with a labeled nucleotide analog complementary to the nucleotide at the position of the variable site; for example, thermal cycling is carried out in the presence of fluorescent dideoxyribonucleotides. The experimental conditions will be adjusted in particular to the chips used, to the immobilized primers, to the polymerases used and to the labeling system chosen. An advantage of the microsequencing, compared to techniques based on probe hybridization, is that it makes it possible to identify all the variable nucleotides with optimal discrimination under homogeneous reaction conditions; when used on DNA chips, it allows optimal resolution and specificity for the routine and industrial detection of mutations in a multiplex.

[0109] The use of the high density filters and/or the chips thus makes it possible to obtain new knowledge regarding gene regulation in organisms of industrial importance, and in particular the listeria propagated under diverse conditions. It also allows rapid identification of the differences between the genomes of the strains used in many industrial applications.

[0110] In addition, a DNA chip or a filter can be an extremely advantageous tool for determining, detecting and/or identifying a microorganism. Thus, the DNA chips according to the invention which also contain at least one nucleotide sequence of the microorganism other than Listeria monocytogenes 4b or Listeria innocua, immobilized on the support of said chip, are also preferred. The microorganism chosen is preferably done so from the bacteria of the genus Listeria (hereinafter referred to as L. monocytogenes-related bacteria), or the variants of Listeria monocytogenes EGD-e.

[0111] A DNA chip or a filter according to the invention is a very useful element of certain kits or sets for detecting and/or identifying microorganisms, in particular the bacteria belonging to the species Listeria monocytogenes or the related microorganisms, which are also subjects of the invention.

[0112] Moreover, the DNA chips or the filters according to the invention, containing probes or primers specific for Listeria innocua or monocytogenes, are very advantageous elements of kits or sets for detecting and/or quantifying the expression of genes of Listeria innocua or monocytogenes (or related microorganisms).

[0113] Specifically, the control of gene expression is a critical point for optimizing the growth and yield of a strain, either by allowing the expression of one or more new genes, or by modifying the expression of genes already present in the cell. The present invention provides all of the sequences naturally active in L. innocua which allow gene expression. It thus makes it possible to determine all the sequences expressed in L. innocua. It also provides a tool for pinpointing the genes whose expression follows a given scheme. To do this, the DNA of all or some of the genes of L. innocua and monocytogenes can be amplified using the primers according to the invention, and then attached to a support such as, for example, glass or nylon or a DNA chip, in order to construct a tool for following the expression profile of these genes. This tool, consisting of this support containing the coding sequences, serves as a matrix of hybridization to a mixture of labeled molecules reflecting the messenger RNAs expressed in the cell (in particular the labeled probes according to the invention). By repeating this experiment at various moments and combining all of the data using suitable processing, the expression profiles of all these genes are then obtained. The knowledge of the sequences which follow a given regulatory scheme can also be taken advantage of to search for, in a directed manner, for example by homology, other sequences following overall, but in a slightly different way, the same regulatory scheme. In addition, it is possible to isolate each control sequence present upstream of the segments acting as probes and to follow the activity thereof using suitable means such as a reporter gene (luciferase, β-galactosidase, GFP). These isolated sequences can then be modified and assembled by metabolic engineering with sequences of interest with a view to the optimal expression thereof.

[0114] The invention also relates to the polypeptides encoded by a nucleotide sequence according to the invention, preferably by a representative fragment of the preceding sequences, corresponding to an ORF sequence. In particular, the polypeptides of Listeria innocua encoded by the sequences SEQ ID No. 12 to SEQ ID No. 689, SEQ ID Nos. 2042 and 2043, SEQ ID Nos. 2047 and 2048, SEQ ID Nos. 2053 to 2056 and SEQ ID Nos. 2059 to 2601, in particular by SEQ ID Nos. 2059 to 2601, or those of Listeria monocytogenes EGDe, characterized in that they are chosen from the polypeptides encoded by the sequences SEQ ID No. 690 to SEQ ID No. 1067, SEQ ID No. 2049 to SEQ ID No. 2052 and SEQ ID Nos. 2602 to 2871, in particular SEQ ID Nos. 2602 to 2871, or those of Listeria monocytogenes 4b, characterized in that they are chosen from polypeptides encoded by the sequences SEQ ID No. 3892 to SEQ ID No. 4025, are subjects of the invention.

[0115] The invention also comprises the polypeptides characterized in that they comprise a polypeptide chosen from:

[0116] a) a polypeptide according to the invention;

[0117] b) a polypeptide exhibiting at least 80%, preferably 85%, 90%, 95% and 98%, identity with a polypeptide according to the invention;

[0118] c) a fragment of at least 5 amino acids of a polypeptide according to the invention, or as defined in b);

[0119] d) a biologically active fragment of a polypeptide according to the invention, or as defined in b) or c); and

[0120] e) a polypeptide according to the invention or as defined in b), c) or d) which has been modified.

[0121] The nucleotide sequences encoding the polypeptides described above are also subjects of the invention.

[0122] In the present description, the terms “polypeptides”, “polypeptide sequences”, “peptides” and “proteins” are interchangeable. The term “polypeptide” comprises any amino acid sequence making it possible to generate an antibody response.

[0123] It should be understood that the invention does not concern the polypeptides in natural form, i.e. they are not taken in their natural environment. On the other hand, it concerns those which it has been possible to isolate or obtain by purification from natural sources, or as those obtained by genetic recombination or by chemical synthesis, and they can then comprise unnatural amino acids as already described below.

[0124] The expression “polypeptide exhibiting a certain percentage identity with another”, which will also be referred to as “homologous polypeptide”, is intended to denote the polypeptides exhibiting, compared to the natural polypeptides, certain modifications, in particular deletion, addition or substitution of at least one amino acid, a truncation, an extension, a chimeric solution and/or mutation, or the polypeptides exhibiting post-translation modifications. Among the homologous polypeptides, preference is given to those in which the amino acid sequence exhibits at least 80%, preferably 85%, 90%, 95% and 98%, homology with the amino acid sequences of the polypeptides according to the invention. In the case of a substitution, one or more consecutive or nonconsecutive amino acid(s) is (are) replaced with “equivalent” amino acids. The expression “equivalent amino acids” is here aimed at denoting any amino acid capable of being substituted for one of the amino acids of the basic structure without, however, essentially modifying the biological activities of the corresponding peptides as they will be defined subsequently.

[0125] These equivalent amino acids can be determined either based on their structural homology with the amino acids for which they substitute, or on results of comparative biological activity assays between the various polypeptides liable to be produced.

[0126] By way of example, mention is made of the substitution possibilities which can be made without it resulting in a profound modification of the biological activity of the corresponding modified polypeptide. It is thus possible to replace leucine with valine or isoleucine, aspartic acid with glutamic acid, glutamine with asparagine, arginine with lysine, etc., it naturally being possible to envision the reverse substitutions under the same conditions.

[0127] The homologous polypeptides also correspond to the polypeptides encoded by the homologous or identical nucleotide sequences as defined previously and thus comprise, in the present definition, mutated polypeptides or polypeptides corresponding to inter- or intraspecies variations which can exist in Listeria and which correspond in particular to truncations, substitutions, deletions and/or additions of at least one amino acid residue.

[0128] It is understood that the percentage identity between two polypeptides is calculated in the same way as between two nucleic acid sequences. Thus, the percentage identity between two polypeptides is calculated after optimal alignment of these two sequences, on a window of maximum homology. To define said window of maximum homology, the same algorithms as for the nucleic acid sequences can be used.

[0129] The expression “biologically active fragment of a polypeptide according to the invention” is intended to denote in particular a polypeptide fragment, as defined below, exhibiting at least one of the biological characteristics of the polypeptides according to the invention, particularly in that it is capable of exercising in general even a partial activity, such as, for example:

[0130] an enzymatic (metabolic) activity or an activity which may be involved in the biosynthesis or the biodegradation of organic or inorganic compounds;

[0131] a structural activity (cell envelope, chaperone molecule, ribosome);

[0132] a transport activity (energy transport, ion transport); or an activity in protein secretion;

[0133] an activity in the process of replication, amplification, preparation, transcription, translation or maturation, in particular of DNA, of RNA or of proteins.

[0134] The expression “polypeptide fragment according to the invention” is intended to denote a polypeptide comprising at least 5 amino acids, preferably 10, 15, 25, 50, 100 and 150 amino acids.

[0135] The polypeptide fragments can correspond to isolated or purified fragments naturally present in the strains of Listeria, or to fragments which can be obtained by cleavage of said polypeptide with a proteolytic enzyme, such as trypsin or chymotrypsin or collagenase, or with a chemical reagent (cyanogen bromide, CNBr) or by placing said polypeptide in a very acidic environment (for example at pH=2.5). Polypeptide fragments can also be prepared by chemical synthesis, or from hosts transformed with an expression vector according to the invention which contain a nucleic acid which allows expression of said fragment and is placed under the control of the appropriate regulatory and/or expression element.

[0136] The term “modified polypeptide” of a polypeptide according to the invention is intended to denote a polypeptide obtained by genetic recombination or by chemical synthesis as described later, which exhibits at least one modification compared to the normal sequence. These modifications may in particular be made on amino acids necessary for the specificity or the effectiveness of the activity, or responsible for the structural conformation, for the charge or for the hydrophobicity of the polypeptide according to the invention. It is thus possible to create polypeptides with equivalent, increased or decreased activity, or with equivalent, stricter or broader specificity. Among the modified polypeptides, mention should be made of the polypeptides in which up to five amino acids can be modified, truncated at the N- or C-terminal end, or else deleted, or added.

[0137] As is indicated, the aim of the modifications to a polypeptide is in particular:

[0138] to allow its use in methods of biosynthesis or of biodegradation of organic or inorganic compounds,

[0139] to allow its use in methods of replication, of amplification, of repair and of regulation of transcription, translation or maturation in particular of DNA, RNA or proteins,

[0140] to allow its improved secretion,

[0141] to modify its solubility, or the effectiveness or specificity of its activity, or else to facilitate its purification.

[0142] Chemical synthesis also has the advantage of being able to use unnatural amino acids or nonpeptide bonds. Thus, it may be advantageous to use unnatural amino acids, for example in the D form, or amino acid analogs, in particular the sulfur-containing forms.

[0143] The present invention provides the nucleotide sequence of the Listeria innocua genome and the partial sequence of Listeria monocytogenes serotype 4b, and also some polypeptide sequences.

[0144] Preferably, the invention relates to a nucleotide sequence according to the invention, characterized in that it encodes a polypeptide of Listeria innocua or monocytogenes 4b or one of its fragments, involved in amino acid biosynthesis.

[0145] Preferably, the invention relates to a nucleotide sequence according to the invention, characterized in that it encodes a polypeptide of Listeria innocua or monocytogenes 4b, or one of its fragments, involved in the biosynthesis of cofactors, prosthetic groups and transporters.

[0146] Preferably, the invention relates to a nucleotide sequence according to the invention, characterized in that it encodes a cell envelope polypeptide or a polypeptide present at the surface of Listeria innocua or monocytogenes 4b, or one of its fragments.

[0147] Preferably, the invention relates to a nucleotide sequence according to the invention, characterized in that it encodes a polypeptide of Listeria innocua or monocytogenes 4b, or one of its fragments, involved in the cellular machinery.

[0148] Preferably, the invention relates to a nucleotide sequence according to the invention, characterized in that it encodes a polypeptide of Listeria innocua or monocytogenes 4b, or one of its fragments, involved in central intermediate metabolism.

[0149] Preferably, the invention relates to a nucleotide sequence according to the invention, characterized in that it encodes a polypeptide of Listeria innocua or monocytogenes 4b, or one of its fragments, involved in energy metabolism.

[0150] Preferably, the invention relates to a nucleotide sequence according to the invention, characterized in that it encodes a polypeptide of Listeria innocua or monocytogenes 4b, or one of its fragments, involved in fatty acid and phospholipid metabolism.

[0151] Preferably, the invention relates to a nucleotide sequence according to the invention, characterized in that it encodes a polypeptide of Listeria innocua or monocytogenes 4b, or one of its fragments, involved in the metabolism of nucleotides, purines, pyrimidines or nucleosides.

[0152] Preferably, the invention relates to a nucleotide sequence according to the invention, characterized in that it encodes a polypeptide of Listeria innocua or monocytogenes 4b, or one of its fragments, involved in regulatory functions.

[0153] Preferably, the invention relates to a nucleotide sequence according to the invention, characterized in that it encodes a polypeptide of Listeria innocua or monocytogenes 4b, or one of its fragments, involved in the replication process.

[0154] Preferably, the invention relates to a nucleotide sequence according to the invention, characterized in that it encodes a polypeptide of Listeria innocua or monocytogenes 4b, or one of its fragments, involved in the transcription process.

[0155] Preferably, the invention relates to a nucleotide sequence according to the invention, characterized in that it encodes a polypeptide of Listeria innocua or monocytogenes 4b, or one of its fragments, involved in the translation process.

[0156] Preferably, the invention relates to a nucleotide sequence according to the invention, characterized in that it encodes a polypeptide of Listeria innocua or monocytogenes 4b, or one of its fragments, involved in the process of protein transport and binding.

[0157] Preferably, the invention relates to a nucleotide sequence according to the invention, characterized in that it encodes a polypeptide of Listeria innocua or monocytogenes 4b, or one of its fragments, involved in adaptation to atypical conditions.

[0158] Preferably, the invention relates to a nucleotide sequence according to the invention, characterized in that it encodes a polypeptide of Listeria innocua or monocytogenes 4b, or one of its fragments, involved in sensitivity to medicinal products and analogs.

[0159] Preferably, the invention relates to a nucleotide sequence according to the invention, characterized in that it encodes a polypeptide of Listeria innocua or monocytogenes 4b, or one of its fragments, involved in functions relating to transposons.

[0160] Preferably, the invention relates to a nucleotide sequence according to the invention, characterized in that it encodes a polypeptide specific for Listeria innocua or monocytogenes 4b, or one of its fragments.

[0161] In another aspect, a subject of the invention is preferably a polypeptide according to the invention, characterized in that it is a polypeptide of Listeria innocua or monocytogenes 4b, or one of its fragments, involved in amino acid biosynthesis.

[0162] In another aspect, a subject of the invention is preferably a polypeptide according to the invention, characterized in that it is a polypeptide of Listeria innocua or monocytogenes 4b, or one of its fragments, involved in the biosynthesis of cofactors, prosthetic groups and transporters.

[0163] According to another aspect, a subject of the invention is preferably a polypeptide according to the invention, characterized in that it is a cell envelope polypeptide or a surface polypeptide of Listeria innocua or monocytogenes 4b, or one of its fragments.

[0164] In another aspect, a subject of the invention is preferably a polypeptide according to the invention, characterized in that it is a polypeptide of Listeria innocua or monocytogenes 4b, or one of its fragments, involved in the cellular machinery.

[0165] In another aspect, a subject of the invention is preferably a polypeptide according to the invention, characterized in that it is a polypeptide of Listeria innocua or monocytogenes 4b, or one of its fragments, involved in central intermediate metabolism.

[0166] In another aspect, a subject of the invention is preferably a polypeptide according to the invention, characterized in that it is a polypeptide of Listeria innocua or monocytogenes 4b, or one of its fragments, involved in energy metabolism.

[0167] In another aspect, a subject of the invention is preferably a polypeptide according to the invention, characterized in that it is a polypeptide of Listeria innocua or monocytogenes 4b, or one of its fragments, involved in fatty acid and phospholipid metabolism.

[0168] In another aspect, a subject of the invention is preferably a polypeptide according to the invention, characterized in that it is a polypeptide of Listeria innocua or monocytogenes 4b, or one of its fragments, involved in the metabolism of nucleotides, purines, pyrimidines or nucleosides.

[0169] In another aspect, a subject of the invention is preferably a polypeptide according to the invention, characterized in that it is a polypeptide of Listeria innocua or monocytogenes 4b, or one of its fragments, involved in regulatory functions.

[0170] In another aspect, a subject of the invention is preferably a polypeptide according to the invention, characterized in that it is a polypeptide of Listeria innocua or monocytogenes 4b, or one of its fragments, involved in the replication process.

[0171] In another aspect, a subject of the invention is preferably a polypeptide according to the invention, characterized in that it is a polypeptide of Listeria innocua or monocytogenes 4b, or one of its fragments, involved in the transcription process.

[0172] In another aspect, a subject of the invention is preferably a polypeptide according to the invention, characterized in that it is a polypeptide of Listeria innocua or monocytogenes 4b, or one of its fragments, involved in the translation process.

[0173] In another aspect, a subject of the invention is preferably a polypeptide according to the invention, characterized in that it is a polypeptide of Listeria innocua or monocytogenes 4b, or one of its fragments, involved in the process of protein transport and binding.

[0174] In another aspect, a subject of the invention is preferably a polypeptide according to the invention, characterized in that it is a polypeptide of Listeria innocua or monocytogenes 4b, or one of its fragments, involved in adaptation to atypical conditions.

[0175] In another aspect, a subject of the invention is preferably a polypeptide according to the invention, characterized in that it is a polypeptide of Listeria innocua or monocytogenes 4b, or one of its fragments, involved in sensitivity to medicinal products and analogs.

[0176] In another aspect, a subject of the invention is preferably a polypeptide according to the invention, characterized in that it is a polypeptide of Listeria innocua or monocytogenes 4b, or one of its fragments, involved in functions relating to transposons.

[0177] In another aspect, a subject of the invention is preferably a polypeptide according to the invention, characterized in that it is a polypeptide specific for Listeria innocua or monocytogenes 4b, or one of its fragments.

[0178] It is important to note, however, that a living organism is a whole entity and should be taken as such. Thus, in order to be able to develop and exhibit its properties, any organism needs interactions between the various metabolic pathways. Thus, the classification stated above should not be considered to be limiting, it being possible for a gene to be involved in two distinct metabolic pathways.

[0179] A subject of the present invention is also the nucleotide and/or polypeptide sequences according to the invention, characterized in that said sequences are recorded on a recording medium, the form and nature of which facilitate the reading, analysis and/or exploitation of said sequence(s). These media may also contain other information extracted from the present invention, in particular the analogies with already known sequences, and/or information concerning the nucleotide and/or polypeptide sequences of other microorganisms, in order to facilitate the comparative analysis and exploitation of the results obtained.

[0180] Among these recording media, preference is given in particular to computer-readable media, such as magnetic, optical, electrical or hybrid media, in particular computer disks, CD-ROMs and computer servers. Such recording media are also a subject of the invention.

[0181] The recording media according to the invention, with the information provided, are very useful for choosing nucleotide primers or probes for determining genes in Listeria innocua or monocytogenes 4b or strains close to this organism. Similarly, the use of these media for studying the genetic polymorphism of strains close to Listeria innocua or monocytogenes 4b, in particular by determining the regions of colinearity, is very useful insofar as these media provide not only the nucleotide sequence of the genome of Listeria innocua or monocytogenes 4b, but also the genomic organization in said sequence. Thus, the uses of recording media according to the invention are also subjects of the invention.

[0182] The analysis of homology between various sequences is in fact advantageously performed using sequence comparison programs, such as the Blast program, or the programs of the GCG package, described above.

[0183] The invention is also directed toward the cloning and/or expression vectors which contain a nucleotide sequence according to the invention.

[0184] The vectors according to the invention preferably comprise elements which allow the expression and/or the secretion of the nucleotide sequences in a given host cell.

[0185] The vector should then comprise a promoter, translation initiation and termination signals, and also regions suitable for regulating transcription. It must be possible for it to be maintained stably in the host cell and it may optionally contain particular signals which specify secretion of the translated protein. These various elements are chosen and optimized by those skilled in the art, depending on the cellular host used. To this effect, the nucleotide sequences according to the invention can be inserted into vectors which replicate autonomously in the host chosen, or may be vectors which integrate in the host chosen.

[0186] Such vectors are prepared by methods commonly used by those skilled in the art, and the resulting clones can be introduced into a suitable host using standard methods, such as lipofection, electroporation, heat shock or chemical methods.

[0187] The vectors according to the invention are, for example, vectors of plasmid or viral origin. They are of use in transforming host cells in order to clone or express the nucleotide sequences according to the invention.

[0188] The invention also comprises the host cells transformed with a vector according to the invention.

[0189] The cellular host may be chosen from prokaryotic or eukaryotic systems, for example bacterial cells but also yeast cells or animal cells, in particular mammalian cells. Insect cells or plant cells may also be used. The preferred host cells according to the invention are in particular prokaryotic cells, preferably bacteria belonging to the genus Listeria, to the species Listeria innocua or monocytogenes 4b, or the microorganisms related to the species Listeria innocua or monocytogenes 4b. The invention also relates to the plants and the animals, except humans, which comprise a transformed cell according to the invention. The transformed cells according to the invention can be used in methods for preparing recombinant polypeptides according to the invention. The methods for preparing a polypeptide according to the invention in recombinant form, characterized in that they use a vector and/or a cell transformed with a vector according to the invention are themselves included in the present invention. Preferably, a cell transformed with a vector according to the invention is cultured under conditions which allow the expression of said polypeptide, and said recombinant polypeptide is recovered.

[0190] As has been mentioned, the cellular host can be chosen from prokaryotic or eukaryotic systems. In particular, it is possible to identify nucleotide sequences according to the invention which facilitate secretion in such a prokaryotic or eukaryotic system. A vector according to the invention carrying such a sequence can therefore be advantageously used for producing recombinant proteins intended to be secreted. As a result, the purification of these recombinant proteins of interest will be facilitated by the fact that they are present in the cell culture supernatant rather than inside the host cells.

[0191] The polypeptides according to the invention may also be prepared by chemical synthesis. Such a method of preparation is also a subject of the invention. Those skilled in the art are aware of the methods of chemical synthesis, for example the techniques using solid phases (see in particular Steward et al., 1984, Solid phase peptides synthesis, Pierce Chem. Company, Rockford, 111, 2nd Ed., (1984)) or techniques using partial solid phases, by fragment condensation or by conventional synthesis in solution. The polypeptides obtained by chemical synthesis, and possibly comprising corresponding unnatural amino acids, are also included in the invention.

[0192] The invention also relates to hybrid polypeptides having at least one polypeptide or one of its fragments according to the invention, and a sequence of a polypeptide capable of inducing an immune response in humans or animals.

[0193] Advantageously, the antigenic determinant is such that it is capable of inducing a humoral and/or cellular response.

[0194] Such a determinant may comprise a polypeptide or one of its fragments according to the invention in a glycosylated form used for the purpose of obtaining immunogenic compositions capable of inducing the synthesis of antibodies directed against multiple epitopes. Said polypeptides or their glycosylated fragments are also part of the invention.

[0195] These hybrid molecules may consist partly of a molecule bearing polypeptides or their fragments according to the invention, combined with an optionally immunogenic component, in particular an epitope of the diphtheria toxin, the tetanus toxin, a surface antigen of the hepatitis B virus (patent FR 79 21811), the VP1 antigen of the poliomyelitis virus or any other viral or bacterial antigen or toxin.

[0196] The methods for synthesizing the hybrid molecules encompass the methods used in gene therapy to construct hybrid nucleotide sequences encoding desired polypeptide sequences. Reference may, for example, advantageously be made to the technique for obtaining genes encoding fusion proteins, described by Minton in 1984.

[0197] Said hybrid nucleotide sequences encoding a hybrid polypeptide and also the hybrid polypeptides according to the invention, characterized in that they are recombinant polypeptides obtained by the expression of said hybrid nucleotide sequences, are also part of the invention.

[0198] The invention also comprises the vectors characterized in that they contain one of said hybrid nucleotide sequences. The host cells transformed by said vectors, the transgenic animals comprising one of said transformed cells and also the methods for preparing recombinant polypeptides using said vectors, said transformed cells and/or said transgenic animals are also part of the invention.

[0199] The coupling between a polypeptide according to the invention and an immunogenic polypeptide may be carried out chemically or biologically. Thus, according to the invention, it is possible to introduce one or more attachment element(s), in particular amino acids, so as to facilitate the reactions for coupling between the polypeptide according to the invention and the immunostimulatory polypeptide, the covalent coupling of the immunostimulatory antigen possibly being carried out at the N- or C-terminal end of the polypeptide according to the invention. Bifunctional reagents for this coupling are determined as a function of the end chosen for carrying out this coupling, and the coupling techniques are well known to those skilled in the art.

[0200] The conjugates derived from a peptide coupling may be prepared by genetic recombination. The hybrid peptide (conjugate) may in fact be produced by recombinant DNA techniques, by insertion or addition of a sequence encoding the antigenic, immunogenic or hapten peptide (s), into the DNA sequence encoding the polypeptide according to the invention. These techniques for preparing hybrid peptides by genetic recombination are well known to those skilled in the art (see, for example, Makrides, 1996, Microbiological Reviews 60, 512-538).

[0201] Preferably, said immuno polypeptide is chosen from the group of peptides containing toxoids, in particular diphtheria toxoid or tetanus toxoid, Streptococcus-derived proteins (such as human serum albumin-binding protein), OMPA membrane proteins and outer membrane protein complexes, outer membrane vesicles or heat shock proteins.

[0202] The hybrid polypeptides according to the invention are very useful for obtaining monoclonal or polyclonal antibodies capable of specifically recognizing the polypeptides according to the invention. In fact, a hybrid polypeptide according to the invention allows potentiation of the immune response, against the polypeptide according to the invention coupled to the immunogenic molecule. Such monoclonal or polyclonal antibodies, fragments thereof or the chimeric antibodies, which recognize the polypeptides according to the invention, are also subjects of the invention.

[0203] The specific monoclonal antibodies may be obtained according to the conventional method of hybridoma culturing described by Köhler and Milstein (1975, Nature 256, 495).

[0204] The antibodies according to the invention are, for example, chimeric antibodies, humanized antibodies, or Fab or F(ab′)² fragments. They may also be in the form of immunoconjugates or of antibodies which are labeled in order to obtain a detectable and/or quantifiable signal.

[0205] Thus, the antibodies according to the invention can be used in a method for detecting and/or identifying bacteria belonging to the species Listeria innocua or monocytogenes 4b, or to a related microorganism, in a biological sample, characterized in that it comprises the following steps:

[0206] a) bringing the biological sample into contact with an antibody according to the invention;

[0207] b) demonstrating the antigen-antibody complex possibly formed.

[0208] The antibodies according to the present invention can also be used in order to detect expression of a gene of Listeria innocua or monocytogenes 4b or related microorganisms. Specifically, the presence of the expression product of a gene recognized by an antibody specific for said expression product can be detected by the presence of an antigen-antibody complex formed after the strain of Listeria innocua or monocytogenes 4b or of the related microorganism has been brought into contact with an antibody according to the invention. The bacterial strain used may have been “prepared”, i.e. centrifuged, lyzed, placed in an appropriate reagent for constituting the medium suitable for the immunoreaction. In particular, preference is given to a method for detecting the expression in the gene, corresponding to Western blotting, which may be performed after polyacrylamide gel electrophoresis of a lysate of the bacterial strain, in the presence or absence of reducing conditions (SDS-PAGE). After migration and separation of the proteins on the polyacrylamide gel, said proteins are transferred onto a suitable membrane (for example made of nylon) and the presence of the protein or of the polypeptide of interest is detected by bringing said membrane into contact with an antibody according to the invention.

[0209] Thus, the present invention also comprises the kits or sets necessary for carrying out a method as described (for detecting the expression of a gene of Listeria innocua or monocytogenes 4b, or their related microorganism, or for detecting and/or identifying bacteria belonging to the species Listeria innocua or monocytogenes 4b, or a related microorganism), comprising the following elements:

[0210] a) a polyclonal or monoclonal antibody according to the invention;

[0211] b) optionally, the reagents for constituting the medium suitable for the immunoreaction;

[0212] c) optionally, the reagents for demonstrating the antigen-antibody complexes produced by the immunoreaction.

[0213] The polypeptides and the antibodies according to the invention can advantageously be immobilized on a support, in particular a protein chip. Such a protein chip is a subject of the invention and may also contain at least one polypeptide of a microorganism other than Listeria innocua or monocytogenes 4b, or an antibody directed against a compound of a microorganism other than Listeria innocua or monocytogenes 4b.

[0214] The protein chips or high density filters containing proteins according to the invention can be constructed in the same way as the DNA chips according to the invention. In practice, it is possible to carry out the synthesis of the polypeptides directly attached to the protein chip, or to carry out an ex situ synthesis followed by a step of attaching the synthesized polypeptide to said chip. The latter method is preferable when the intention is to attach proteins of considerable size to the support, these proteins being advantageously prepared by genetic engineering. However, if the intention is to attach only peptides to the support of said chip, it may be more advantageous to synthesize said peptides directly in situ.

[0215] The protein chips according to the invention may advantageously be used in kits or sets for detecting and/or identifying bacteria related to the species Listeria innocua or monocytogenes 4b, or to a microorganism, or more generally in kits or sets for detecting and/or identifying microorganisms. When the polypeptides according to the invention are attached to DNA chips, the presence of antibodies in the samples tested is sought, the attachment of an antibody according to the invention to the support of the protein chip allowing identification of the protein for which said antibody is specific.

[0216] Preferably, an antibody according to the invention is attached to the support of the protein chip and the presence of the corresponding antigen, specific for Listeria innocua or monocytogenes 4b, or for a related microorganism, is detected.

[0217] A protein chip described above can be used to detect gene products, in order to establish an expression profile for said genes, in addition to a DNA chip according to the invention.

[0218] The protein chips according to the invention are also extremely useful for proteomic experiments, which study interactions between the various proteins of a given microorganism. In a simplified manner, representative peptides of the various proteins of an organism are attached to a support. Said support is then brought into contact with labeled proteins and, after an optional rinsing step, interactions between said labeled proteins and the peptides attached to the protein chip are detected.

[0219] Thus, the protein chips comprising a polypeptide sequence according to the invention or an antibody according to the invention are a subject of the invention, as are the kits or sets containing them.

[0220] The present invention also covers a method for detecting and/or identifying bacteria belonging to the species Listeria innocua or monocytogenes 4b, or to a related microorganism, in a biological sample, which uses a nucleotide sequence according to the invention.

[0221] It should be understood that, in the present invention, the term “biological sample” concerns samples taken from a living organism (in particular blood, tissues, organs or others taken from a mammal) or a sample containing biological material, i.e. DNA or RNA. Such a biological sample also comprises food compositions containing bacteria (for example cheeses, dairy products), but also food compositions containing yeast (beers, breads) or others. The term “biological sample” also concerns bacteria isolated from these samples or food compositions.

[0222] The method of detection and/or identification using the nucleotide sequences according to the invention may be diverse in nature.

[0223] A method comprising the following steps is preferred:

[0224] a) optionally isolating the DNA from the biological sample to be analyzed, or obtaining a cDNA from the RNA of the biological sample;

[0225] b) specifically amplifying the DNA of bacteria belonging to the species Listeria innocua or monocytogenes 4b, or to a related microorganism, using at least one primer according to the invention;

[0226] c) demonstrating the amplification products.

[0227] This method is based on the specific amplification of the DNA, in particular via a polymerase chain reaction.

[0228] A method comprising the following steps is also preferred:

[0229] a) bringing a nucleotide probe according to the invention into contact with a biological sample, the nucleic acid contained in the biological sample having, where appropriate, previously been made accessible to hybridization, under conditions which allow hybridization of the probe to the nucleic acid of a bacterium belonging to the species Listeria innocua or monocytogenes 4b, or to a related microroganism;

[0230] b) demonstrating the hybrid possibly formed between the nucleotide probe and the DNA of the biological sample.

[0231] Such a method should not be limited to detecting the presence of the DNA contained in the biological sample to be tested, it can also be used to detect the RNA contained in said sample. This method in particular encompasses Southern and Northern blotting.

[0232] Another preferred method according to the invention comprises the following steps:

[0233] a) bringing a nucleotide probe immobilized on a support according to the invention into contact with a biological sample, the nucleic acid of the sample having, where appropriate, previously been made accessible to hybridization, under conditions which allow hybridization of the probe to the nucleic acid of a bacterium belonging to the species Listeria innocua or monocytogenes 4b, or to a related microorganism;

[0234] b) bringing the hybrid formed between the nucleotide probe immobilized on a support and the nucleic acid contained in the biological sample, where appropriate after removing the DNA of the biological sample which has not hybridized with the probe, into contact with a labeled nucleotide probe according to the invention;

[0235] c) demonstrating the new hybrid formed in step b).

[0236] This method is advantageously used with a DNA chip according to the invention, the nucleic acid being sought hybridizing with a probe present at the surface of said chip, and being detected using a labeled probe. This method is advantageously carried out by combining a prior step of amplifying the DNA or the complementary DNA optionally obtained by reverse transcription, using primers according to the invention.

[0237] Thus, the present invention also encompasses the kits or sets for detecting and/or identifying bacteria belonging to the species Listeria innocua or monocytogenes 4b, or to a related microorganism, characterized in that they comprise the following elements:

[0238] a) a nucleotide probe according to the invention;

[0239] b) optionally, the reagents required for carrying out a hybridization reaction;

[0240] c) optionally, at least one primer according to the invention and also the reagents required for a DNA amplification reaction.

[0241] Similarly, the present invention also encompasses the kits or sets for detecting and/or identifying bacteria belonging to the species Listeria innocua or monocytogenes 4b, or to a related microorganism, characterized in that they comprise the following elements:

[0242] a) a nucleotide probe, termed capture probe, according to the invention;

[0243] b) an oligonucleotide probe, termed detection probe, according to the invention;

[0244] c) optionally, at least one primer according to the invention and also the reagents required for a DNA amplification reaction.

[0245] Finally, the kits or sets for detecting and/or identifying bacteria belonging to the species Listeria innocua or monocytogenes 4b, or to a related microorganism, characterized in that they comprise the following elements:

[0246] a) at least one primer according to the invention;

[0247] b) optionally, the reagents required to carry out a DNA amplification reaction;

[0248] c) optionally, a component for verifying the sequence of the amplified fragment, more particularly an oligonucleotide probe according to the invention, are also subjects of the present invention.

[0249] Preferably, said primers and/or probes and/or polypeptides and/or antibodies according to the present invention, used in the methods and/or kits or sets according to the present invention, are chosen from the primers and/or probes and/or polypeptides and/or antibodies specific for the species Listeria innocua or monocytogenes 4b. Preferably, these elements are chosen from the nucleotide sequences encoding a secreted protein, from the secreted polypeptides, or from the antibodies directed against secreted polypeptides of Listeria innocua or monocytogenes 4b.

[0250] A subject of the present invention is also the strains of Listeria innocua or monocytogenes 4b, and/or of related microorganisms, containing one or more mutation(s) in a nucleotide sequence according to the invention, in particular an ORF sequence, or regulatory elements thereof (in particular promoters).

[0251] According to the invention, preference is given to the strains of Listeria innocua or monocytogenes 4b exhibiting one or more mutation(s) in the nucleotide sequences encoding polypeptides involved in the cellular machinery, in particular secretion, central intermediate metabolism, energy metabolism, and processes of amino acid synthesis, of transcription and translation, and of polypeptide synthesis.

[0252] Said mutations may lead to inactivation of the gene or, in particular when they are located in the regulatory elements of said gene, to overexpression of this gene.

[0253] The invention also relates to the use of a nucleotide sequence according to the invention, of a polypeptide according to the invention, of an antibody according to the invention, of a cell according to the invention, and/or of a transformed animal according to the invention, for selecting an organic or inorganic compound capable of modulating, regulating, inducing or inhibiting gene expression, and/or of modifying cell replication in eukaryotic or prokaryotic cells, or capable of inducing, inhibiting or worsening pathological conditions associated with an infection with Listeria innocua or monocytogenes 4b or one of its related microorganisms.

[0254] The invention also comprises a method for selecting compounds capable of binding to a polypeptide, or one of its fragments, according to the invention, capable of binding to a nucleotide sequence according to the invention, or capable of recognizing an antibody according to the claim, and/or capable of modulating, regulating, inducing or inhibiting gene expression, and/or of modifying cell growth or replication in eukaryotic or prokaryotic cells, or capable of inducing, inhibiting or worsening, in an animal or human organism, pathological conditions associated with an infection with Listeria, for example with L. monocytogenes 4b, or one of its related microorganisms, characterized in that it comprises the following steps:

[0255] a) bringing said compound into contact with said polypeptide or said nucleotide sequence or with a transformed cell according to the invention and/or administering said compound to a transformed animal according to the invention;

[0256] b) determining the ability of said compound to bind to said polypeptide or said nucleotide sequence, or to modulate, regulate, induce or inhibit gene expression, or to modulate cell growth or replication, or to induce, inhibit or worsen, in the said transformed animal, pathological conditions associated with an infection with Listeria, for example L. monocytogenes 4b or one of its related microorganisms.

[0257] The transformed cells and/or animals according to the invention may advantageously serve as a model and be used in methods for studying, identifying and/or selecting compounds which may be responsible for pathological conditions induced or worsened by Listeria monocytogenes, or which may prevent and/or treat these pathological conditions. In particular, the transformed host cells, in particular the bacteria of the Listeria family, the transformation of which with a vector according to the invention may, for example, increase or inhibit its infectious capacity, or modulate the pathological conditions usually induced or worsened by the infection, may be used to infect animals in which the appearance of the pathological conditions will be followed. These nontransformed animals, infected for example with transformed Listeria bacteria, may serve as a study model. In the same way, the transformed animals according to the invention may be used in methods for selecting compounds capable of preventing and/or treating diseases due to Listeria. Said methods using said transformed cells and/or transformed animals are part of the invention.

[0258] The compounds liable to be selected may be organic compounds such as polypeptides or carbohydrates or any other organic or inorganic compounds which are already known, or new organic compounds developed using molecular modeling techniques and obtained by chemical or biochemical synthesis, these techniques being known to those skilled in the art.

[0259] Said selected compounds may be used to model the cell growth and/or replication of Listeria innocua or monocytogenes 4b, or any other related microorganism, and thus to control infection with these microorganisms. Said compounds according to the invention may also be used to model cell growth and/or replication of any eukaryotic or prokaryotic cells, in particular tumor cells and infectious microorganisms, for which said compounds will prove to be active, the methods for determining said modulations being well known to those skilled in the art.

[0260] The expression “compound capable of modulating the growth of a microorganism” is intended to denote any compound making it possible to intervene in, modify, limit and/or reduce the development, growth, proliferation rate and/or viability of said microorganism.

[0261] This modulation may be carried out, for example, using an agent capable of binding to a protein and thus of inhibiting or potentiating its biological activity, or capable of binding to an outer surface membrane protein of a microorganism and blocking the penetration of said microorganism into the host cell or promoting the action of the immune system of the infected organism, directed against said microorganism. This modulation may also be carried out using an agent capable of binding to a nucleotide sequence of a DNA or RNA of a microorganism and blocking, for example, the expression of a polypeptide, the biological or structural activity of which is necessary for the growth or for the reproduction of said microorganism.

[0262] In the present invention, the term “related microorganism” is intended to denote any microorganism in which the gene expression may be modulated, regulated, induced or inhibited, or in which cell growth or replication may also be modulated, by a compound of the invention. In the present invention, the term “related microorganism” is also intended to denote any microorganism comprising nucleotide sequences or polypeptides according to the invention. These microorganisms may, in certain cases, comprise polypeptides or nucleotide sequences identical or homologous to those of the invention and may also be detected and/or identified using the methods or kit for detection and/or identification according to the invention and may also serve as a target for the compounds of the invention. The term “microorganism” is also intended to denote any Listeria monocytogenes microorganism of any serotype.

[0263] The invention relates to the compounds which can be selected using a selection method according to the invention.

[0264] The invention also relates to a pharmaceutical composition comprising a compound chosen from the following compounds:

[0265] a) a nucleotide sequence according to the invention;

[0266] b) a polypeptide according to the invention;

[0267] c) a vector according to the invention;

[0268] d) an antibody according to the invention; and

[0269] e) a compound which can be selected using a selection method according to the invention, optionally in combination with a pharmaceutically acceptable vehicle.

[0270] The term “effective amount” is intended to denote a sufficient amount of said compound or antibody, or polypeptide according to the invention, for modulating the growth of Listeria innocua or monocytogenes 4b or of a related microorganism.

[0271] The invention also relates to a pharmaceutical composition according to the invention, for preventing or treating an infection with a bacterium belonging to the genus Listeria, or with a related microorganism.

[0272] The invention is also directed toward an immunogenic and/or vaccine composition, characterized in that it comprises one or more polypeptides according to the invention and/or one or more hybrid polypeptides according to the invention.

[0273] The invention also comprises the use of a transformed cell according to the invention, for preparing a vaccine composition.

[0274] The invention is also directed toward a vaccine composition, characterized in that it contains a nucleotide sequence according to the invention, a vector according to the invention and/or a transformed cell according to the invention.

[0275] The invention also relates to the vaccine compositions according to the invention, for preventing or treating an infection with a bacterium belonging to the genus Listeria, or with a related microorganism.

[0276] Preferably, the immunogenic and/or vaccine compositions according to the invention intended for the prevention and/or treatment of infection with Listeria, or with a related microorganism, will be chosen from the immunogenic and/or vaccine compositions comprising a polypeptide, or one of its fragments, corresponding to a protein, or one of its fragments, of the cell envelope of Listeria. The vaccine compositions comprising nucleotide sequences will preferably also comprise nucleotide sequences encoding a polypeptide, or one of its fragments, corresponding to a protein, or one of its fragments, of the cell envelope of Listeria.

[0277] The polypeptides of the invention, or their fragments, which are part of the immunogenic compositions according to the invention can be selected using techniques known to those skilled in the art, such as, for example, the ability of said polypeptides to stimulate T cells, which causes, for example, the proliferation thereof or the secretion of interleukins, and which results in the production of antibodies directed against said polypeptides.

[0278] In mice, to which a weight dose of the vaccine composition comparable to the dose used in humans is administered, the antibody reaction is tested by taking a serum sample and then studying the formation of a complex between the antibodies present in the serum and the antigen of the vaccine composition, according to usual techniques.

[0279] According to the invention, said vaccine compositions will preferably be in combination with a pharmaceutically acceptable vehicle and, where appropriate, with one or more suitable adjuvants of immunity.

[0280] Today, various types of vaccine are available for protecting humans against infectious diseases: attenuated live microorganisms (M. bovis—BCG for tuberculosis), inactivated microorganisms (flu virus), acellular extracts (Bordetella pertussis for whooping cough), recombined proteins (hepatitis B virus surface antigen) and polysaccharides (pneumococci). Vaccines prepared from synthetic peptides or from genetically modified microorganisms expressing heterologous antigens are undergoing experimentation. Even more recently, recombined plasmid DNAs carrying genes encoding protective antigens have been proposed as an alternative vaccine strategy. This type of immunization is carried out with a particular plasmid derived from an E. coli plasmid which does not replicate in vivo and which encodes only the immunizing protein. Animals have been immunized by simply injecting the naked plasmid DNA into muscle. This technique leads to the expression of the vaccine protein in situ and to an immune response of the cellular type (CTL) and of the humoral type (antibodies). This double induction of the immune response is one of the main advantages of the technique of immunization with naked DNA.

[0281] The vaccine compositions comprising nucleotide sequences or vectors into which said sequences are inserted are in particular described in international application No. WO 90/11092 and also in international application No. WO 95/11307.

[0282] The nucleotide sequence constituting the vaccine composition according to the invention can be injected into the host after having been coupled to compounds which promote the penetration of this polynucleotide into the cell or its transport to the cell nucleus. The resulting conjugates can be encapsulated in polymeric microparticles, as described in international application No. WO 94/27238 (Medisorb Technologies International).

[0283] According to another embodiment of the vaccine composition according to the invention, the nucleotide sequence, preferably a DNA, is complexed with DEAE-dextran, with nuclear proteins or lipids, or encapsulated in liposomes or else introduced in the form of a gel which facilitates its transfection into cells. The polynucleotide or the vector according to the invention may also be in suspension in a buffer solution or may be associated with liposomes.

[0284] Advantageously, such a vaccine will be prepared in accordance with the technique described by Tacson et al. or Huygen et al. in 1996 or else in accordance with the technique described by Davis et al. in international application No. WO 95/11307.

[0285] Such a vaccine may also be prepared in the form of a composition containing a vector according to the invention, placed under the control of regulatory elements for its expression in humans or animals. As a vector for in vivo expression of the polypeptide antigen of interest, use may, for example, be made of the plasmid pcDNA3 or the plasmid pcDNA1/neo, both marketed by Invitrogen (R & D Systems, Abingdom, United Kingdom). Such a vaccine will advantageously comprise, besides the recombinant vector, a saline solution, for example a sodium chloride solution.

[0286] The expression “pharmaceutically acceptable vehicle” is intended to denote a compound, or a combination of compounds, included in a pharmaceutical or vaccine composition, which does not cause any side reactions and which makes it possible, for example, to facilitate administration of the active compound, to increase the lifetime thereof and/or the effectiveness thereof in the organism, to increase the solubility thereof in solution or else to improve the conservation thereof. These pharmaceutically acceptable vehicles are well known and will be adjusted by those skilled in the art as a function of the nature and of the method of administration of the active compound chosen.

[0287] With regard to the vaccine formulations, they may comprise suitable adjuvants of immunity which are known to those skilled in the art, such as, for example, aluminum hydroxide, a representative of the muramyl peptide family, such as one of the peptide derivatives of N-acetylmuramyl, a bacterial lysate, or else incomplete Freund's adjuvant.

[0288] Preferably, these compounds will be administered systemically, in particular intravenously, intramuscularly, intradermally or subcutaneously, or orally. More preferably, the vaccine composition comprising the polypeptides according to the invention will be administered several times, spread out over time, intradermally or subcutaneously.

[0289] The optimal methods of administration, doses and pharmaceutical forms of these compounds can be determined according to the criteria generally taken into account in establishing a suitable treatment for a patient, such as, for example, the age or body weight of the patient, the seriousness of his or her general condition, the tolerance to the treatment and the side effects noted.

[0290] Finally, the invention comprises the use of a composition according to the invention, for treating or preventing diseases induced or worsened by the presence of Listeria.

[0291] Moreover, a subject of the present invention is also a genomic DNA library of a bacterium of the genus Listeria, preferably Listeria innocua or monocytogenes, preferably the 4b strain.

[0292] The genomic DNA libraries described in the present invention, in particular the Li-shotgun library deposited with the CNCM [National Collection of Cultures and Microorganisms] on Oct. 2, 2000, under the accession No. I-2565 and the Lmb4b-shotgun library deposited with the CNCM on Oct. 2, 2000, under the accession No. I-2566, in fact cover the genome of Listeria innocua and Listeria monocytogenes 4b, respectively. However, although certain regions could not be cloned into said library, due to problems of lethality in Escherichia coli, these regions can easily be amplified and identified by those skilled in the art, using oligonucleotides specific for the sequences of the ends of the various clones which form the contigs.

[0293] The present invention also relates to the methods for isolating a polynucleotide of interest present in a strain of Listeria and absent from another strain, which use at least one DNA library based, for example, on a plasmid pcDNA2.1 containing the Listeria genome. The method according to the invention for isolating a polynculeotide of interest may comprise the following steps:

[0294] a) isolating at least one polynucleotide contained in a clone of the library of DNA from Listeria;

[0295] b) isolating:

[0296] at least one genomic polynucleotide or cDNA of a listeria, said listeria belonging to a strain which is different from the strain used to construct the DNA library of step a) or, alternatively,

[0297] at least one polynucleotide contained in a clone from a DNA library prepared from the genome of a Listeria which is different from the Listeria used to construct the DNA library of step a);

[0298] c) hybridizing the polynucleotide of step a) to the polynucleotide of step b);

[0299] d) selecting the polynucleotides of step a) which have not formed a hybridization complex with the polynucleotides of step b);

[0300] e) characterizing the polynucleotide selected.

[0301] The polynucleotide of step a) can be prepared by digesting at least one recombinant clone with a suitable restriction enzyme and, optionally, amplifying the polynucleotide insert which results therefrom.

[0302] Thus, the method of the invention allows those skilled in the art to perform comparative genomic studies between the various strains or species of the genus Listeria, for example between the pathogenic strains and their nonpathogenic equivalents.

[0303] In particular, it is possible to study and determine the regions of polymorphism between said strains.

### EXAMPLES

### 1. Construction of the Libraries

[0304] The chromosomal DNA of the strains studied was prepared using a conventional method including treatment with proteinase K and extraction with phenol (C. Jacquet et al., Zentralbl Bakteriol., 276:356-365, 1992). Approximately 10 μg of DNA were broken up by nebulization (1 minute under a pressure of 1 bar) (C. Buchrieser et al., Infect. Immun., 67:4851-4861, 1999). The ends of the DNA fragments were blunt-ended by the action of T4 bacteriophage DNA polymerase for 15 minutes at 37° C. in the presence of the 4 nucleotide triphosphates. The enzyme was inactivated by incubation at 75° C. for 15 min. Linkers (invitrogen Cat. No. 408-18) were then ligated to these ends. After ligation, the chromosomal DNA fragments of between 1 000 and 3 000 base pairs in size were purified after agarose gel electrophoresis. The vector used to construct the library, pcDNA2.1 (Invitrogen), was digested with the BstX1 enzyme and purified with geneclean (BIO-101) after agarose gel electrophoresis. The chromosomal DNA and the purified vector were ligated by the action of T4 bacteriophage ligase. The ligation mixture was introduced into the Escherichia coli strain XL2-blue (Stratagene) by transformation. Approximately 4 000 colonies were obtained per μl of the ligation mixture.

[0305] This method is used to construct the Li-shotgun library deposited with the CNCM on Oct. 2, 2000, under the No. I-2565 for the strain Listeria innocua (CLIP 11262) and the Lm4b-shotgun library deposited with the CNCM on Oct. 2, 2000, under the No. I-2566 for the strain Listeria monocytogenes serotype 4b (CLIP 80459).

### 2. Preparation of the Plasmids and Sequencing

[0306] Plasmids were prepared by a semi-automatic method of preparation developed in the GMP laboratory (Génomique des Micro-organismes Pathogènes de l'Institut Pasteur [Genomics of Pathogenic Microorganisms of the Pasteur Institute]) based on the alkaline lysis method (H. C. Bimboim, Methods Enzymol., 100:243-255, 1983). The chromosomal inserts were sequenced from both of their ends using the T7 and universal primers, according to the supplier's recommendations (PE-biosystems). The sequences were determined using automatic sequencers of the 377 and 3700 type (PE-Biosystem).

### 3. Sequence Assembly

[0307] The sequences were assembled using the software package developed at the University of Washington, Phred, Phrap and Consed (B. Ewing et al., Genome Res., 8:186-194, 1998; D. Gordon et al., Genome Res., 8:195-202, 1998). The sequence was finished using the software package GMPTB (L. Frangeul et al., Microbiology, 145:2625-2634, 1999). The finishing step corresponds to the resequencing of the regions in which the sequence is relatively unsure and the sequencing of the regions located between the contigs. It was carried out either by sequencing PCR products or by walking on the clones from the library. The sequences of the oligonucleotides were defined using the consed and Primo software (D. Gordon et al., 1998; P. Li et al., Genomics, 40:476-485, 1997).

### 4. Sequence Annotation

[0308] The coding sequences (CDS) were identified using the GMPTB software package. This program combines the results of various methods: (i) identification of open reading frames and sorting thereof as a function of their size, (ii) analysis of the probability of being coding using the Genemark software (A. V. Lukashin et al., Nucleic Acids Res., 15:1107-1115, 1998), (iii) identification of a start of translation (initiation codon and ribosome-binding sequence), (iv) similarity of the deduced protein sequence with the protein sequences contained in the sequence banks using the BLASTP software.

[0309] The functions of the proteins encoded by the coding sequences identified were predicted by analyzing the results from searching for similarities in the banks using the BLASTP software (S. F. Altschul et al., Nucleic Acids Research, 25:3389-402, 1997).

### 5. Comparison of Genomes

[0310] a) Identification of the CDS Specific for the Strain of L. monocytogenes EGDe and for the Strain of L. innocua

[0311] All of the protein sequences deduced from the predicted coding sequences of each genome were compared to all of the protein sequences possibly encoded by the other genome using the BLASTP software. A threshold of 75% identity over the entire length of the protein was selected in order to identify the proteins specific for an isolate. This very high value was selected since it is the best for discriminating between orthologous genes and paralogous genes (W. S. Fitch, Syst. Zool., 19:99-113, 1970). For the protein sequences for which the sequence conservation is high (>70%), conservation of the nucleotide sequences of the genes will itself also be high and might give a signal under relatively nonstringent hybridization conditions. It will be necessary to take this eventuality into account in analyzing the result of the test.

[0312] b) Identification of the CDS Specific for the L. monocytogenes Serotype 4b Strain Compared to the L. monocytogenes EGDe Strain and the L. innocua Strain

[0313] The chromosomal regions of the L. monocytogenes serotype 4b strain which are absent from the L. monocytogenes EGDe and L. innocua strains were identified using the Crossmatch/Phrap package (Phil Green, University of Washington, Seattle, unpublished). This software makes it possible to assemble nucleotide sequences (Phrap) by masking all the sequences or parts of sequences similar to one or more reference sequences (Crossmatch). The reference sequences used were: the complete sequence of the genome of L. monocytogenes EGD, the complete sequence of the genome of L. innocua and the sequence of its plasmid. The identification by Crossmatch of the regions which will be masked is based on the search for words of 11 identical letters between the sequence analyzed and the reference sequences, and the extension of these words using the default parameters of the software. More information on the Crossmatch and Phrap software is available on the website: http://bozeman.mbt.washington.edu/.

### 6. Examples of Annotations

[0314] 6.1. Genes specific for L. monocytogenes. There is no significant similarity between the nucleotide sequences of the gene of L. monocytogenes and the genome of L innocua.

TABLE I

| | ID of the gene of | % identity of the | % identity of |
|---|---|---|---|
| ID of the gene of | L. innocua | protein sequences | the nucleotide |
| L. monocytogenes | (best score) | (% of the sequence) | sequences |
| 1814.1 SEQ ID No. 779 | — | — | — |
| 2601.1 SEQ ID No. 851 | — | — | — |
| 615.1 SEQ ID No. 1034 | — | — | — |
| 1713.1 SEQ ID No. 772 | 5385.1 SEQ ID No. 2042 | 25% (100%) | ≦40% |
| 1656.1 SEQ ID No. 768 | 526.1 SEQ ID No. 684 | 36% (50%) | ≦40% |
| 3477.1 SEQ ID No. 908 | 1614.1 SEQ ID No. 632 | 33% (60%) | ≦40% |
| 3418.2 SEQ ID No. 904 | 1235.1 SEQ ID No. 2043 | 30% (70%) | ≦40% |

[0315] 6.2. Genes specific for L. innocua. There is no significant similarity between the nucleotide sequence of the gene of L. innocua and the genome of L. monocytogenes.

TABLE II

| | ID of the gene of | % identity of the | % identity of the |
|---|---|---|---|
| ID of the gene of | L. monocytogenes | protein | nucleotide |
| L. innocua | (best score) | sequences | sequences |
| 1259.1 SEQ ID No. 689 | — | — | — |
| 3320.1 SEQ ID No. 527 | — | — | — |
| 1348.1 SEQ ID No. 596 | 1545.1 SEQ ID No. 2044 | 26% (70%) | ≦40% |
| 4232.1 SEQ ID No. 681 | 894.1 SEQ ID No. 2045 | 30% (90%) | ≦40% |
| 5550.1 SEQ ID No. 519 | 312.1 SEQ ID No. 2046 | 31% (60%) | ≦40% |
| 3320.1 SEQ ID No. 527 | 558.1 SEQ ID No. 1025 | 25% (50%) | ≦40% |

[0316] 6.3. Genes common to the two strains for which the similarity (identity) of the deduced protein sequences is less than 75% and value of the similarity at the nucleotide level.

TABLE III

| | ID of the gene of | % identity of the | % identity of |
|---|---|---|---|
| ID of the gene of | L. innocua | protein sequences | the nucleotide |
| L. monocytogenes | (best score) | (% of the sequence) | sequences |
| 1343 SEQ ID No. 727 | 36.1 SEQ ID No. 528 | 57% (100%) | 67% |
| 725.1 SEQ ID No. 1046 | 1402.1 SEQ ID No. 2047 | 52% (100%) | 60% |
| 1002.1 SEQ ID No. 690 | 1021.1 SEQ ID No. 666 | 50% (100%) | 65% |
| 1974.3 SEQ ID No. 789 | 897.1 SEQ ID No. 2048 | 49% (100%) | 58% |

[0317] 6.4. Genes common to L. monocytogenes and L. innocua

TABLE IV

| | ID of the gene of | % identity of the | % identity of |
|---|---|---|---|
| ID of the gene of | L. innocua | protein sequences | the nucleotide |
| L. monocytogenes | (best score) | (% of the sequence) | sequences |
| 1976.1 SEQ ID No. 2049 | 5481.1 SEQ ID No. 2053 | 88% (100%) | 82% |
| 1979.1 SEQ ID No. 2050 | 5476.1 SEQ ID No. 2054 | 98% (100%) | 86% |
| 1980.1 SEQ ID No. 2051 | 5474.1 SEQ ID No. 2055 | 84% (100%) | 80% |
| 1983.1 SEQ ID No. 2052 | 5471.1 SEQ ID No. 2056 | 87% (100%) | 79% |

[0318] Table V: Legends

[0319] SEQ ID Nos. 1-11: nucleotide sequences of 10 Contigs and 1 plasmid originating from the assembly of Listeria innocua

[0320] SEQ ID Nos. 12-689: nucleotide sequences of the proteins specific for L. innocua (absent from L. monocytogenes-EGD).

[0321] SEQ ID Nos. 690-1067: nucleotide sequences of proteins specific for L. monocytogenes-EGD (absent from L. innocua).

[0322] SEQ ID Nos. 1068-2041: nucleotide sequences of 974 contigs originating from the assembly of Listeria monocytogenes-4b (1 231 537 bases).

[0323] SEQ ID Nos. 2042-2056: additional sequences for annotation examples.

TABLE V

| | | Blastp result on non-redondant protein bank. | | |
|---|---|---|---|---|
| SEQ ID | Prot N^{o} | homology/ | Comments/ | % |
| SEQ ID N^{o} 12 | LI-1779.1 | | No Hits found | |
| SEQ ID N^{o} 13 | LI-4603.1 | | No Hits found | |
| SEQ ID N^{o} 14 | LI-4611.1 | | No Hits found | |
| SEQ ID N^{o} 15 | LI-6102.1 | | No Hits found | |
| SEQ ID N^{o} 16 | LI-738.2 | | | |
| SEQ ID N^{o} 17 | LI-1983.1 | | No Hits found | |
| SEQ ID N^{o} 18 | LI-2952.1 | | No Hits found | |
| SEQ ID N^{o} 19 | LI-3070.1 | | No Hits found | |
| SEQ ID N^{o} 20 | LI-1237.1 | | No Hits found | |
| SEQ ID N^{o} 21 | LI-1718.1 | 56 | emb\|CAB83919.1\| (AL162753) hypothetical protein NMA0630 [Neisseria | Length = 304 |
| | | | meningitidis] | |
| SEQ ID N^{o} 22 | LI-1869.1 | | No Hits found | |
| SEQ ID N^{o} 23 | LI-1910.1 | | No Hits found | |
| SEQ ID N^{o} 24 | LI-3373.1 | 78 | emb\|CAB53845.1\| (AJ242593) gp55 [Bacteriophage A118] | Length = 69 |
| SEQ ID N^{o} 25 | LI-372.1 | | No Hits found | |
| SEQ ID N^{o} 26 | LI-3727.1 | | No Hits found | |
| SEQ ID N^{o} 27 | LI-3807.1 | | No Hits found | |
| SEQ ID N^{o} 28 | LI-438.1 | | No Hits found | |
| SEQ ID N^{o} 29 | LI-4981.1 | | No Hits found | |
| SEQ ID N^{o} 30 | LI-4992.1 | | No Hits found | |
| SEQ ID N^{o} 31 | LI-6200.1 | | | |
| SEQ ID N^{o} 32 | LI-1487.1 | | No Hits found | |
| SEQ ID N^{o} 33 | LI-1603.1 | | No Hits found | |
| SEQ ID N^{o} 34 | LI-2986.1 | | No Hits found | |
| SEQ ID N^{o} 35 | LI-3365.1 | 41 | emb\|CAB53854.1\| (AJ242593) gp64 [Bacteriophage A118] | Length = 41 |
| SEQ ID N^{o} 36 | LI-5554.1 | | No Hits found | |
| SEQ ID N^{o} 37 | LI-5726.1 | | No Hits found | |
| SEQ ID N^{o} 38 | LI-1495.1 | | No Hits found | |
| SEQ ID N^{o} 39 | LI-2951.1 | | No Hits found | |
| SEQ ID N^{o} 40 | LI-2959.1 | | No Hits found | |
| SEQ ID N^{o} 41 | LI-5588.1 | | No Hits found | |
| SEQ ID N^{o} 42 | LI-5922.1 | | No Hits found | |
| SEQ ID N^{o} 43 | LI-6071.1 | | No Hits found | |
| SEQ ID N^{o} 44 | LI-6072.1 | | No Hits found | |
| SEQ ID N^{o} 45 | LI-2374.1 | | No Hits found | |
| SEQ ID N^{o} 46 | LI-2937.1 | 51 | pir\|\|F70357 lipoprotein - Aquifex aeolicus gb\|AAC06844.1\| (AE000700) | Length = 349 |
| | | | lipoprotein [Aquifex aeolicus] | |
| SEQ ID N^{o} 47 | LI-4114.1 | | No Hits found | |
| SEQ ID N^{o} 48 | LI-5780.1 | | No Hits found | |
| SEQ ID N^{o} 49 | LI-5706.1 | 65 | emb\|CAB53820.1\| (AJ242593) gp34 [Bacteriophage A118] | Length = 72 |
| SEQ ID N^{o} 50 | LI-3139.1 | | No Hits found | |
| SEQ ID N^{o} 51 | LI-3800.1 | | No Hits found | |
| SEQ ID N^{o} 52 | LI-385.1 | | No Hits found | |
| SEQ ID N^{o} 53 | LI-5458.2 | | | |
| SEQ ID N^{o} 54 | LI-5803.1 | | No Hits found | |
| SEQ ID N^{o} 55 | LI-128.1 | | No Hits found | |
| SEQ ID N^{o} 56 | LI-2428.1 | | No Hits found | |
| SEQ ID N^{o} 57 | LI-3087.1 | | No Hits found | |
| SEQ ID N^{o} 58 | LI-5915.1 | | No Hits found | |
| SEQ ID N^{o} 59 | LI-6036.1 | | No Hits found | |
| SEQ ID N^{o} 60 | LI-175.1 | | No Hits found | |
| SEQ ID N^{o} 61 | LI-1816.1 | | No Hits found | |
| SEQ ID N^{o} 62 | LI-2777.1 | 46 | gb\|AAC36979.1\| (L15633) [Conjugative transposon Tn916 (from Enterococcus faecalis, | |
| | | | DS16), 3′ end.], gene products [Transposon Tn916] gb\|AAB60027.1\| (U09422) ORF8 | |
| | | | [Enterococcus faecalis] prf\|\|2114402V ORF 8 [Enterococcus faecalis] | |
| SEQ ID N^{o} 63 | LI-2932.1 | | No Hits found | |
| SEQ ID N^{o} 64 | LI-1611.1 | | No Hits found | |
| SEQ ID N^{o} 65 | LI-2702.1 | | No Hits found | |
| SEQ ID N^{o} 66 | LI-2989.1 | | No Hits found | |
| SEQ ID N^{o} 67 | LI-4125.1 | | No Hits found | |
| SEQ ID N^{o} 68 | LI-4628.1 | | No Hits found | |
| SEQ ID N^{o} 69 | LI-5606.1 | | No Hits found | |
| SEQ ID N^{o} 70 | LI-6148.2 | | | |
| SEQ ID N^{o} 71 | LI-2237.1 | | No Hits found | |
| SEQ ID N^{o} 72 | LI-6190.1 | | | |
| SEQ ID N^{o} 73 | LI-4167.1 | | No Hits found | |
| SEQ ID N^{o} 74 | LI-5459.2 | | | |
| SEQ ID N^{o} 75 | LI-568.1 | | No Hits found | |
| SEQ ID N^{o} 76 | LI-6191.1 | | | |
| SEQ ID N^{o} 77 | LI-1368.1 | | No Hits found | |
| SEQ ID N^{o} 78 | LI-1538.1 | | No Hits found | |
| SEQ ID N^{o} 79 | LI-2694.1 | | No Hits found | |
| SEQ ID N^{o} 80 | LI-678.1 | | No Hits found | |
| SEQ ID N^{o} 81 | LI-2181.1 | | No Hits found | |
| SEQ ID N^{o} 82 | LI-3662.1 | | No Hits found | |
| SEQ ID N^{o} 83 | LI-6121.1 | | No Hits found | |
| SEQ ID N^{o} 84 | LI-6163.1 | | No Hits found | |
| SEQ ID N^{o} 85 | LI-1240.1 | | No Hits found | |
| SEQ ID N^{o} 86 | LI-2030.1 | | No Hits found | |
| SEQ ID N^{o} 87 | LI-3363.1 | | No Hits found | |
| SEQ ID N^{o} 88 | LI-4294.1 | | No Hits found | |
| SEQ ID N^{o} 89 | LI-5611.2 | | | |
| SEQ ID N^{o} 90 | LI-6041.1 | | No Hits found | |
| SEQ ID N^{o} 91 | LI-6162.1 | | No Hits found | |
| SEQ ID N^{o} 92 | LI-1082.1 | | No Hits found | |
| SEQ ID N^{o} 93 | LI-1928.1 | | No Hits found | |
| SEQ ID N^{o} 94 | LI-2878.1 | 36 | pir\|\|C72489 hypothetical protein APE2554 - Aeropyrum pernix (strain K1) | Length = 105 |
| | | | dbj\|BAA81571.1\| (AP000064) 105aa long hypothetical protein [Aeropyrum pernix] | |
| SEQ ID N^{o} 95 | LI-3676.1 | | No Hits found | |
| SEQ ID N^{o} 96 | LI-4023.1 | | No Hits found | |
| SEQ ID N^{o} 97 | LI-4475.1 | | No Hits found | |
| SEQ ID N^{o} 98 | LI-5540.1 | | No Hits found | |
| SEQ ID N^{o} 99 | LI-2946.1 | | No Hits found | |
| SEQ ID N^{o} 100 | LI-2988.1 | | No Hits found | |
| SEQ ID N^{o} 101 | LI-2990.1 | | No Hits found | |
| SEQ ID N^{o} 102 | LI-439.1 | | No Hits found | |
| SEQ ID N^{o} 103 | LI-5607.1 | | No Hits found | |
| SEQ ID N^{o} 104 | LI-4005.1 | | No Hits found | |
| SEQ ID N^{o} 105 | LI-4022.1 | | No Hits found | |
| SEQ ID N^{o} 106 | LI-4683.1 | 31 | gb\|AAA72562.1\| (M15619) ORF16-lacZ fusion protein [synthetic construct] | Length = 68 |
| SEQ ID N^{o} 107 | LI-4931.1 | | No Hits found | |
| SEQ ID N^{o} 108 | LI-1139.1 | | No Hits found | |
| SEQ ID N^{o} 109 | LI-3703.1 | 43 | gb\|AAC97745.1\| (AF063866) ORF MSV233 hypothetical protein [Melanoplus | Length = 92 |
| | | | sanguinipes entomopoxvirus] | |
| SEQ ID N^{o} 110 | LI-6145.1 | | No Hits found | |
| SEQ ID N^{o} 111 | LI-2179.1 | | No Hits found | |
| SEQ ID N^{o} 112 | LI-3431.1 | | No Hits found | |
| SEQ ID N^{o} 113 | LI-478.1 | | No Hits found | |
| SEQ ID N^{o} 114 | LI-711.1 | | No Hits found | |
| SEQ ID N^{o} 115 | LI-1092.1 | | No Hits found | |
| SEQ ID N^{o} 116 | LI-2061.1 | | No Hits found | |
| SEQ ID N^{o} 117 | LI-3990.1 | | No Hits found | |
| SEQ ID N^{o} 118 | LI-4006.1 | | No Hits found | |
| SEQ ID N^{o} 119 | LI-5373.1 | | No Hits found | |
| SEQ ID N^{o} 120 | LI-5551.1 | 52 | gb\|AAA32614.1\| (L31364) holin [Bacteriophage Tuc2009] | Length = 88 |
| SEQ ID N^{o} 121 | LI-3362.1 | | No Hits found | |
| SEQ ID N^{o} 122 | LI-4107.1 | | No Hits found | |
| SEQ ID N^{o} 123 | LI-4121.1 | | No Hits found | |
| SEQ ID N^{o} 124 | LI-5546.1 | | No Hits found | |
| SEQ ID N^{o} 125 | LI-5548.1 | | No Hits found | |
| SEQ ID N^{o} 126 | LI-5710.1 | 72 | emb\|CAB53829.1\| (AJ242593) gp40 [Bacteriophage A118] | Length = 78 |
| SEQ ID N^{o} 127 | LI-5957.1 | | No Hits found | |
| SEQ ID N^{o} 128 | LI-6149.2 | | | |
| SEQ ID N^{o} 129 | LI-1615.1 | | No Hits found | |
| SEQ ID N^{o} 130 | LI-2926.1 | | No Hits found | |
| SEQ ID N^{o} 131 | LI-3068.1 | | No Hits found | |
| SEQ ID N^{o} 132 | LI-5560.1 | 59 | sp\|P45937\|YQCB_BACSU HYPOTHETICAL 10.4 KD PROTEIN IN SPOIIIC- | |
| | | | CWLA INTERGENIC REGION pir\|\|A69949 hypothetical protein yqcB - Bacillus subtilis | |
| | | | dbj\|BAA06954.1\| (D32216) ORF130 [Bacillus subtilis] dbj\|BAA12418.1\| (D84432) YqcB | |
| | | | [Bacillus subtilis] emb\|CAB | |
| SEQ ID N^{o} 133 | LI-6026.1 | | No Hits found | |
| SEQ ID N^{o} 134 | LI-6098.1 | | No Hits found | |
| SEQ ID N^{o} 135 | LI-2884.1 | | No Hits found | |
| SEQ ID N^{o} 136 | LI-5567.1 | 57 | sp\|P45933\|YQBR_BACSU HYPOTHETICAL 9.5 KD PROTEIN IN SPOIIIC- | |
| | | | CWLA INTERGENIC REGION pir\|\|E69948 phage-related protein homolog yqbR - | |
| | | | Bacillus subtilis dbj\|BAA06950.1\| (D32216) ORF87 [Bacillus subtilis] | |
| | | | dbj\|BAA12414.1\| (D84432) YqbR [Bacillus subtilis] | |
| SEQ ID N^{o} 137 | LI-5709.1 | | No Hits found | |
| SEQ ID N^{o} 138 | LI-4219.1 | | No Hits found | |
| SEQ ID N^{o} 139 | LI-5874.1 | | No Hits found | |
| SEQ ID N^{o} 140 | LI-6101.1 | | No Hits found | |
| SEQ ID N^{o} 141 | LI-943.1 | | No Hits found | |
| SEQ ID N^{o} 142 | LI-3279.1 | | No Hits found | |
| SEQ ID N^{o} 143 | LI-3551.1 | | No Hits found | |
| SEQ ID N^{o} 144 | LI-4065.1 | 47 | gb\|AAB23085.1\|S43512_2 (S43512) orf2 immediately 5′ to ejl [Bacteriophage | Length = 85 |
| | | | EJ-1] | |
| SEQ ID N^{o} 145 | LI-4113.1 | 57 | pir\|\|T09011 probable transposase TnpA - Streptococcus pyogenes (fragment) | Length = 364 |
| | | | gb\|AAB92607.1\| (AF026542) TnpA [Streptococcus pyogenes] | |
| SEQ ID N^{o} 146 | LI-5362.1 | | No Hits found | |
| SEQ ID N^{o} 147 | LI-1694.1 | 63 | pir\|\|F75297 hypothetical protein - Deinococcus radiodurans (strain R1) | Length = 133 |
| | | | gb\|AAF11800.1\|AE002057_8 (AE002057) hypothetical protein [Deinococcus | |
| | | | radiodurans] | |
| SEQ ID N^{o} 148 | LI-4272.1 | | No Hits found | |
| SEQ ID N^{o} 149 | LI-4674.1 | 63 | pir\|\|F75297 hypothetical protein - Deinococcus radiodurans (strain R1) | Length = 133 |
| | | | gb\|AAF11800.1\|AE002057_8 (AE002057) hypothetical protein [Deinococcus | |
| | | | radiodurans] | |
| SEQ ID N^{o} 150 | LI-5637.1 | | No Hits found | |
| SEQ ID N^{o} 151 | LI-6188.1 | | No Hits found | |
| SEQ ID N^{o} 152 | LI-1431.1 | | No Hits found | |
| SEQ ID N^{o} 153 | LI-3567.1 | | No Hits found | |
| SEQ ID N^{o} 154 | LI-3993.1 | | No Hits found | |
| SEQ ID N^{o} 155 | LI-4194.1 | 71 | gb\|AAD40364.1\| (AF036485) putative transposase [Plasmid pNZ4000] | Length = 226 |
| SEQ ID N^{o} 156 | LI-5299.1 | | No Hits found | |
| SEQ ID N^{o} 157 | LI-5570.1 | | No Hits found | |
| SEQ ID N^{o} 158 | LI-1493.1 | | No Hits found | |
| SEQ ID N^{o} 159 | LI-3374.1 | | No Hits found | |
| SEQ ID N^{o} 160 | LI-3654.1 | | No Hits found | |
| SEQ ID N^{o} 161 | LI-4040.1 | | No Hits found | |
| SEQ ID N^{o} 162 | LI-4069.2 | | | |
| SEQ ID N^{o} 163 | LI-4088.1 | | No Hits found | |
| SEQ ID N^{o} 164 | LI-6132.1 | | No Hits found | |
| SEQ ID N^{o} 165 | LI-1533.1 | | No Hits found | |
| SEQ ID N^{o} 166 | LI-5750.1 | | No Hits found | |
| SEQ ID N^{o} 167 | LI-6127.1 | 55 | pir\|\|A41902 arsenical resistance operon repressor - Staphylococcus xylosus | Length = 104 |
| | | | plasmid pSX267 | |
| SEQ ID N^{o} 168 | LI-708.1 | | No Hits found | |
| SEQ ID N^{o} 169 | LI-2517.1 | | No Hits found | |
| SEQ ID N^{o} 170 | LI-1438.1 | | No Hits found | |
| SEQ ID N^{o} 171 | LI-3307.1 | | No Hits found | |
| SEQ ID N^{o} 172 | LI-4151.1 | | No Hits found | |
| SEQ ID N^{o} 173 | LI-550.1 | | No Hits found | |
| SEQ ID N^{o} 174 | LI-5573.1 | | No Hits found | |
| SEQ ID N^{o} 175 | LI-2618.1 | | No Hits found | |
| SEQ ID N^{o} 176 | LI-298.1 | | No Hits found | |
| SEQ ID N^{o} 177 | LI-3652.1 | | No Hits found | |
| SEQ ID N^{o} 178 | LI-5585.1 | | No Hits found | |
| SEQ ID N^{o} 179 | LI-5707.1 | 44 | gb\|AAC38975.1\| (AF041330) NADH dehydrogenase subunit 5 [Bodo saltans] | Length = 212 |
| SEQ ID N^{o} 180 | LI-31.1 | | No Hits found | |
| SEQ ID N^{o} 181 | LI-4041.1 | | No Hits found | |
| SEQ ID N^{o} 182 | LI-4828.1 | | No Hits found | |
| SEQ ID N^{o} 183 | LI-2188.1 | | No Hits found | |
| SEQ ID N^{o} 184 | LI-5616.1 | | No Hits found | |
| SEQ ID N^{o} 185 | LI-2350.1 | | No Hits found | |
| SEQ ID N^{o} 186 | LI-269.1 | | No Hits found | |
| SEQ ID N^{o} 187 | LI-329.1 | | No Hits found | |
| SEQ ID N^{o} 188 | LI-3992.1 | | No Hits found | |
| SEQ ID N^{o} 189 | LI-5409.1 | | No Hits found | |
| SEQ ID N^{o} 190 | LI-6056.1 | | No Hits found | |
| SEQ ID N^{o} 191 | LI-1183.1 | 49 | sp\|P10023\|YGI2_BACTU HYPOTHETICAL 30.3 KD PROTEIN (ORF 2) | Length = 270 |
| | | | emb\|CAA31837.1\| (X13481) ORF 2 [Bacillus thuringiensis] | |
| SEQ ID N^{o} 192 | LI-1282.1 | | No Hits found | |
| SEQ ID N^{o} 193 | LI-2924.1 | | No Hits found | |
| SEQ ID N^{o} 194 | LI-4020.1 | 57 | gb\|AAD21914.1\| (AF085222) unknown [Streptococcus thermophilus | Length = 107 |
| | | | bacteriophage DT1] | |
| SEQ ID N^{o} 195 | LI-5642.1 | 54 | sp\|P02909\|PTLA_STAAU PTS SYSTEM, LACTOSE-SPECIFIC IIA | |
| | | | COMPONENT (EIIA-LAC) (LACTOSE-PERMEASE IIA COMPONENT) | |
| | | | (PHOSPHOTRANSFERASE ENZYME II, A COMPONENT) (EIII-LAC) | |
| | | | gb\|AAA26648.1\| (J03479) enzyme III-lac (lacF) [Staphylococcus aureus] | |
| SEQ ID N^{o} 196 | LI-577.1 | | No Hits found | |
| SEQ ID N^{o} 197 | LI-6012.1 | | No Hits found | |
| SEQ ID N^{o} 198 | LI-3900.1 | | No Hits found | |
| SEQ ID N^{o} 199 | LI-4195.1 | 91 | pir\|\|S49318 transposase - Enterococcus hirae insertion sequence IS1216 | Length = 226 |
| | | | emb\|CAA57312.1\| (X81654) transposase [Enterococcus hirae] | |
| | | | emb\|CAA48844.1\| (X69092) transposase [Enterococcus hirae] | |
| SEQ ID N^{o} 200 | LI-443.1 | | No Hits found | |
| SEQ ID N^{o} 201 | LI-4484.1 | | No Hits found | |
| SEQ ID N^{o} 202 | LI-4869.1 | | No Hits found | |
| SEQ ID N^{o} 203 | LI-5183.1 | 45 | gb\|AAC38975.1\| (AF041330) NADH dehydrogenase subunit 5 [Bodo saltans] | Length = 212 |
| SEQ ID N^{o} 204 | LI-2365.1 | 55 | pir\|\|G72548 hypothetical protein APE1675 - Aeropyrum pernix (strain K1) | Length = 155 |
| | | | dbj\|BAA80676.1\| (AP000062) 155aa long hypothetical protein [Aeropyrum | |
| | | | pernix] | |
| SEQ ID N^{o} 205 | LI-3400.1 | | No Hits found | |
| SEQ ID N^{o} 206 | LI-3989.1 | 56 | emb\|CAB53822.1\| (AJ242593) putative repressor protein [Bacteriophage A118] | Length = 101 |
| SEQ ID N^{o} 207 | LI-4136.1 | | No Hits found | |
| SEQ ID N^{o} 208 | LI-480.1 | | No Hits found | |
| SEQ ID N^{o} 209 | LI-6104.1 | | No Hits found | |
| SEQ ID N^{o} 210 | LI-1935.1 | | No Hits found | |
| SEQ ID N^{o} 211 | LI-2169.1 | | No Hits found | |
| SEQ ID N^{o} 212 | LI-4179.1 | 54 | pir\|\|S38640 replication protein B - Pediococcus halophilus (ATCC 33315) | Length = 168 |
| | | | (cryptic plasmid) emb\|CAA53279.1\| (X75607) RepB [Tetragenococcus | |
| | | | halophilus] prf\|\|2207193B repB gene [Tetragenococcus halophilus] | |
| SEQ ID N^{o} 213 | LI-4533.1 | | No Hits found | |
| SEQ ID N^{o} 214 | LI-5677.1 | 44 | pir\|\|G72510 hypothetical protein APE2061 - Aeropyrum pernix (strain K1) | Length = 114 |
| | | | dbj\|BAA81071.1\| (AP000063) 114aa long hypothetical protein [Aeropyrum | |
| | | | pernix] | |
| SEQ ID N^{o} 215 | LI-623.1 | | No Hits found | |
| SEQ ID N^{o} 216 | LI-807.1 | | No Hits found | |
| SEQ ID N^{o} 217 | LI-2866.1 | 40 | ref\|NP_010291.1\| Ydr008cp pir\|\|S70313 hypothetical protein YDR008c - yeast | Length = 114 |
| | | | (Saccharomyces cerevisiae) | |
| SEQ ID N^{o} 218 | LI-3022.1 | 42 | dbj\|BAA87194.1\| (AB027890) Hypothetical protein [Schizosaccharomyces | Length = 210 |
| | | | pombe] | |
| SEQ ID N^{o} 219 | LI-508.1 | | No Hits found | |
| SEQ ID N^{o} 220 | LI-552.1 | | No Hits found | |
| SEQ ID N^{o} 221 | LI-4086.1 | | No Hits found | |
| SEQ ID N^{o} 222 | LI-4935.1 | | No Hits found | |
| SEQ ID N^{o} 223 | LI-1312.1 | 30 | pir\|\|H72754 hypothetical protein APE0029 - Aeropyrum pernix (strain K1) | Length = 138 |
| | | | dbj\|BAA78938.1\| (AP000058) 138aa long hypothetical protein [Aeropyrum | |
| | | | pernix] | |
| SEQ ID N^{o} 224 | LI-2970.1 | | No Hits found | |
| SEQ ID N^{o} 225 | LI-234.1 | 49 | pir\|\|T31613 hypothetical protein Y50E8A.i - Caenorhabditis elegans | Length = 836 |
| SEQ ID N^{o} 226 | LI-1553.1 | | No Hits found | |
| SEQ ID N^{o} 227 | LI-2935.1 | | No Hits found | |
| SEQ ID N^{o} 228 | LI-2941.1 | | No Hits found | |
| SEQ ID N^{o} 229 | Ll-3325.1 | | No Hits found | |
| SEQ ID N^{o} 230 | LI-4061 .1 | | No Hits found | |
| SEQ ID N^{o} 231 | LI-6086.1 | | No Hits found | |
| SEQ ID N^{o} 232 | LI-2646.1 | 49 | pir\|\|S72740 B1177_F1_12 protein - Mycobacterium leprae gb\|AAA17104.1\| | Length = 219″ |
| | | | (U00011) p1177c; B1177_F1_12 [Mycobacterium leprae] | |
| SEQ ID N^{o} 233 | LI-3823.1 | 55 | pir\|\|C72455 hypothetical protein APE2287 - Aeropyrum pernix (strain K1) | Length = 191 |
| | | | dbj\|BAA81299.1\| (AP000064) 191aa long hypothetical protein [Aeropyrum | |
| | | | pernix] | |
| SEQ ID N^{o} 234 | LI-5622.1 | | No Hits found | |
| SEQ ID N^{o} 235 | LI-1499.1 | 45 | pir\|\|H72469 hypothetical protein APE2401 - Aeropyrum pernix (strain K1) | Length = 252 |
| | | | dbj\|BAA81416.1\| (AP000064) 252aa long hypothetical protein [Aeropyrum | |
| | | | pernix] | |
| SEQ ID N^{o} 236 | LI-4044.1 | | No Hits found | |
| SEQ ID N^{o} 237 | LI-4799.1 | 34 | emb\|CAB57660.1\| (Y18930) hypothetical protein [Sulfolobus solfataricus] | Length = 108 |
| SEQ ID N^{o} 238 | LI-1044.1 | | No Hits found | |
| SEQ ID N^{o} 239 | LI-1247.1 | | No Hits found | |
| SEQ ID N^{o} 240 | LI-5276.1 | | No Hits found | |
| SEQ ID N^{o} 241 | LI-4038.1 | 53 | pir\|\|T39903 serine-rich protein - fission yeast (Schizosaccharomyces pombe) | Length = 534 |
| | | | emb\|CAA22127.1\| (AL033534) hypothetical serine-rich secreted protein | |
| | | | [Schizosaccharomyces pombe] | |
| SEQ ID N^{o} 242 | LI-543.1 | | No Hits found | |
| SEQ ID N^{o} 243 | LI-5937.1 | 55 | gb\|AAC27928.1\| (AF062070) thermosensitive mutant immunity repressor | Length = 147 |
| | | | [bacteriophage phi-105] | |
| SEQ ID N^{o} 244 | LI-2068.1 | 32 | pir\|\|F71456 hypothetical protein PH0308 - Pyrococcus horikoshii | Length = 215 |
| | | | dbj\|BAA29381.1\| (AP000001) 215aa long hypothetical protein [Pyrococcus | |
| | | | horikoshii] | |
| SEQ ID N^{o} 245 | LI-3142.1 | | No Hits found | |
| SEQ ID N^{o} 246 | LI-4047.1 | | No Hits found | |
| SEQ ID N^{o} 247 | LI-4073.1 | | No Hits found | |
| SEQ ID N^{o} 248 | LI-4483.1 | | No Hits found | |
| SEQ ID N^{o} 249 | LI-547.1 | 35 | pir\|\|A70002 protein kinase homolog ytvA - Bacillus subtilis gb\|AAC00382.1\| | Length = 261 |
| | | | (AF008220) putative protein kinase [Bacillus subtilis] emb\|CAB15012.1\| | |
| | | | (Z99119) similar to protein kinase [Bacillus subtilis] | |
| SEQ ID N^{o} 250 | LI-5640.1 | 44 | sp\|Q45399\|PTCB_BACST PTS SYSTEM, CELLOBIOSE-SPECIFIC IIB | |
| | | | COMPONENT (EIIB-CEL) (CELLOBIOSE-PERMEASE IIB | |
| | | | COMPONENT) (PHOSPHOTRANSFERASE ENZYME II, B | |
| | | | COMPONENT) pir\|\|B49898 cellobiose phosphotransferase system celA - | |
| | | | Bacillus | |
| SEQ ID N^{o} 251 | LI-689.1 | 56 | gi\|6321628 Cell wall protein; Crh1p sp\|P53301\|YG46_YEAST HYPOTHETICAL | |
| | | | 52.8 KD PROTEIN IN BUB1-HIP1 INTERGENIC REGION pir\|\|S64507 probable | |
| | | | membrane protein YGR189c - yeast (Saccharomyces cerevisiae) | |
| | | | emb\|CAA97215.1\| (Z72974) ORF YGR189c [Sacch | |
| SEQ ID N^{o} 252 | LI-2066.1 | | No Hits found | |
| SEQ ID N^{o} 253 | LI-4008.1 | | No Hits found | |
| SEQ ID N^{o} 254 | LI-4042.1 | | No Hits found | |
| SEQ ID N^{o} 255 | LI-4145.1 | 95 | gb\|AAB37344.1\| (U78967) cadmium resistance regulatory protein [Lactococcus | Length = 119 |
| | | | lactis] | |
| SEQ ID N^{o} 256 | LI-5586.1 | 51 | sp\|P45924\|YQBH_BACSU HYPOTHETICAL 14.3 KD PROTEIN IN SPOIIIC- | |
| | | | CWLA INTERGENIC REGION pir\|\|C69947 phage-related protein homolog yqbH - | |
| | | | Bacillus subtilis dbj\|BAA12403.1\| (D84432) YqbH [Bacillus subtilis] | |
| | | | emb\|CAB14552.1\| (Z99117) similar to phage-related p | |
| SEQ ID N^{o} 257 | LI-4152.1 | | No Hits found | |
| SEQ ID N^{o} 258 | LI-4154.1 | | No Hits found | |
| SEQ ID N^{o} 259 | LI-4181.1 | 54 | pir\|\|T09011 probable transposase TnpA - Streptococcus pyogenes (fragment) | Length = 364 |
| | | | gb\|AAB92607.1\| (AF026542) TnpA [Streptococcus pyogenes] | |
| SEQ ID N^{o} 260 | LI-4220.1 | | No Hits found | |
| SEQ ID N^{o} 261 | LI-4477.1 | | No Hits found | |
| SEQ ID N^{o} 262 | LI-2014.1 | | No Hits found | |
| SEQ ID N^{o} 263 | LI-5182.1 | 50 | dbj\|BAA97098.1\| (AP002460) gene_id: F1D9.26˜unknown protein [Arabidopsis | Length = 260 |
| | | | thaliana] | |
| SEQ ID N^{o} 264 | LI-5545.1 | | No Hits found | |
| SEQ ID N^{o} 265 | LI-5549.1 | | No Hits found | |
| SEQ ID N^{o} 266 | LI-5556.1 | | No Hits found | |
| SEQ ID N^{o} 267 | LI-6015.1 | | No Hits found | |
| SEQ ID N^{o} 268 | LI-6125.1 | 54 | sp\|Q01256\|ARSR_STAXY ARSENICAL RESISTANCE OPERON REPRESSOR | Length = 104 |
| | | | gb\|AAA27587.1\| (M80565) ars operon regulatory protein (repressor) [Plasmid | |
| | | | pSX267] | |
| SEQ ID N^{o} 269 | LI-6186.1 | | No Hits found | |
| SEQ ID N^{o} 270 | LI-2659.1 | 39 | pir\|\|C69982 hypothetical protein yrzD - Bacillus subtilis emb\|CAB14726.1\| | Length = 98 |
| | | | (Z99118) yrzD [Bacillus subtilis] | |
| SEQ ID N^{o} 271 | LI-2949.1 | | No Hits found | |
| SEQ ID N^{o} 272 | LI-2961.1 | | No Hits found | |
| SEQ ID N^{o} 273 | LI-4478.1 | | No Hits found | |
| SEQ ID N^{o} 274 | LI-283.1 | 29 | pir\|\|D72568 hypothetical protein APE1830 - Aeropyrum pernix (strain K1) | Length = 100 |
| | | | dbj\|BAA80833.1\| (AP000062) 100aa long hypothetical protein [Aeropyrum | |
| | | | pernix] | |
| SEQ ID N^{o} 275 | LI-4899.1 | | No Hits found | |
| SEQ ID N^{o} 276 | LI-521.1 | 58 | gb\|AAF41678.1\| (AE002479) transcriptional regulator, MerR family [Neisseria | Length = 135 |
| | | | meningitidis MC58] emb\|CAB84745.1\| (AL162756) putative transcriptional | |
| | | | regulator [Neisseria meningitidis] | |
| SEQ ID N^{o} 277 | LI-6126.1 | 51 | gb\|AAD51848.1\|AF178758_4 (AF178758) ArsD [Sinorhizobium sp. As4] | Length = 119 |
| SEQ ID N^{o} 278 | LI-1390.1 | | No Hits found | |
| SEQ ID N^{o} 279 | LI-2968.1 | | No Hits found | |
| SEQ ID N^{o} 280 | LI-4132.1 | 46 | gb\|AAF13645.1\|AF188935_43 (AF188935) pXO2-40 [Bacillus anthracis] | Length = 128 |
| SEQ ID N^{o} 281 | LI-6032.1 | | No Hits found | |
| SEQ ID N^{o} 282 | LI-4028.1 | | No Hits found | |
| SEQ ID N^{o} 283 | LI-773.1 | | No Hits found | |
| SEQ ID N^{o} 284 | LI-2038.1 | 46 | sp\|P75869\|YCCR_ECOLI HYPOTHETICAL 24.1 KDA PROTEIN IN SULA-HELD | |
| | | | INTERGENIC REGION pir\|\|F64836 probable membrane protein b0959 - | |
| | | | Escherichia coli gb\|AAC74045.1\| (AE000198) orf, hypothetical protein | |
| | | | [Escherichia coli] dbj\|BAA35717.1\| (D90733) ORF_ID: o223 | |
| SEQ ID N^{o} 285 | LI-2973.1 | | No Hits found | |
| SEQ ID N^{o} 286 | LI-2019.1 | | No Hits found | |
| SEQ ID N^{o} 287 | LI-2052.1 | 50 | gb\|AAD01956.1\| (AF033016) unknown [Listeria monocytogenes] | Length = 75 |
| SEQ ID N^{o} 288 | LI-2945.1 | | No Hits found | |
| SEQ ID N^{o} 289 | LI-4030.1 | | No Hits found | |
| SEQ ID N^{o} 290 | LI-4522.1 | | No Hits found | |
| SEQ ID N^{o} 291 | LI-6030.1 | | No Hits found | |
| SEQ ID N^{o} 292 | LI-2456.1 | | No Hits found | |
| SEQ ID N^{o} 293 | LI-4215.1 | | No Hits found | |
| SEQ ID N^{o} 294 | LI-5926.1 | 61 | emb\|CAA70358.1\| (Y09161) antigen C [Listeria monocytogenes] | Length = 138 |
| SEQ ID N^{o} 295 | LI-2316.1 | 38 | sp\|P25958\|CMG6_BACSU COMG OPERON PROTEIN 6 pir\|\|G69603 DNA | Length = 127 |
| | | | transport machinery comGF - Bacillus subtilis emb\|CAB14399.1\| (Z99116) | |
| | | | probably part of the DNA transport machinery [Bacillus subtilis] | |
| SEQ ID N^{o} 296 | LI-394.1 | | No Hits found | |
| SEQ ID N^{o} 297 | LI-5039.1 | | No Hits found | |
| SEQ ID N^{o} 298 | LI-6068.1 | | No Hits found | |
| SEQ ID N^{o} 299 | LI-6070.1 | | No Hits found | |
| SEQ ID N^{o} 300 | LI-825.1 | 32 | gb\|AAC69727.1\| (AF061128) merozoite surface protein 1 [Plasmodium | Length = 402 |
| | | | falciparum] | |
| SEQ ID N^{o} 301 | LI-2972.1 | | No Hits found | |
| SEQ ID N^{o} 302 | LI-3339.1 | | No Hits found | |
| SEQ ID N^{o} 303 | LI-3371.1 | 80 | emb\|CAB53849.1\| (AJ242593) gp59 [Bacteriophage A118] | Length = 133 |
| SEQ ID N^{o} 304 | LI-3529.1 | | No Hits found | |
| SEQ ID N^{o} 305 | LI-4063.1 | | No Hits found | |
| SEQ ID N^{o} 306 | LI-4808.1 | 38 | sp\|Q09788\|YA9A_SCHPO HYPOTHETICAL 54.2 KD SERINE-RICH PROTEIN | |
| | | | C13G6.10C IN CHROMOSOME I PRECURSOR pir\|\|S62439 hypothetical | |
| | | | protein SPAC13G6.10c - fission yeast (Schizosaccharomyces pombe) | |
| | | | pir\|\|T37645 hypothetical serine rich protei | |
| SEQ ID N^{o} 307 | LI-4099.1 | | No Hits found | |
| SEQ ID N^{o} 308 | LI-5587.1 | 55 | sp\|P45923\|YQBG_BACSU HYPOTHETICAL 14.7 KD PROTEIN IN SPOIIIC- | |
| | | | CWLA INTERGENIC REGION pir\|\|B69947 hypothetical protein yqbG - Bacillus | |
| | | | subtilis dbj\|BAA06940.1\| (D32216) ORF76 [Bacillus subtilis] dbj\|BAA12402.1\| | |
| | | | (D84432) YqbG [Bacillus subtilis] emb\|CAB1 | |
| SEQ ID N^{o} 309 | LI-4963.1 | 35 | pir\|\|E69801 hypothetical protein yfhL - Bacillus subtilis emb\|CAB12686.1\| | Length = 110 |
| | | | (Z99108) yfhL [Bacillus subtilis] dbj\|BAA24478.1\| (D85082) YfhL [Bacillus | |
| | | | subtilis] | |
| SEQ ID N^{o} 310 | LI-3199.1 | | No Hits found | |
| SEQ ID N^{o} 311 | LI-6057.1 | 26 | emb\|CAB01605.1\| (Z78205) UL36 [Bovine herpesvirus 1] emb\|CAA06097.1\| | Length = 3247 |
| | | | (AJ004801) very large virion protein (tegument) [Bovine herpesvirus type | |
| | | | 1.1] | |
| SEQ ID N^{o} 312 | LI-776.1 | 34 | sp\|P42622\|YHAI_ECOLI HYPOTHETICAL 13.5 KD PROTEIN IN EXUR-TDCC | |
| | | | INTERGENIC REGION pir\|\|E65099 hypothetical 13.5 kD protein in exuR-tdcC | |
| | | | intergenic region - Escherichia coli (strain K-12) gb\|AAA57908.1\| | |
| | | | (U18997) ORF_o118 [Escherichia coli] gb\| | |
| SEQ ID N^{o} 313 | LI-3375.1 | | No Hits found | |
| SEQ ID N^{o} 314 | LI-3377.1 | | No Hits found | |
| SEQ ID N^{o} 315 | LI-5565.1 | 68 | sp\|P54338\|XKDS_BACSU PHAGE-LIKE ELEMENT PBSX PROTEIN XKDS | |
| | | | pir\|\|B69733 PBSX prophage ORF xkdS - Bacillus subtilis emb\|CAA94040.1\| | |
| | | | (Z70177) homologous to yqbS of the skin element [Bacillus subtilis] | |
| | | | emb\|CAB13129.1\| (Z99110) PBSX prophage [Bacillus subtil | |
| SEQ ID N^{o} 316 | LI-5935.1 | 52 | dbj\|BAA36659.1\| (AB016282) ORF2 [bacteriophage phi-105] | Length = 148 |
| SEQ ID N^{o} 317 | LI-3998.1 | | No Hits found | |
| SEQ ID N^{o} 318 | LI-6005.1 | 57 | dbj\|BAA36659.1\| (AB016282) ORF2 [bacteriophage phi-105] | Length = 148 |
| SEQ ID N^{o} 319 | LI-1341.1 | | No Hits found | |
| SEQ ID N^{o} 320 | LI-2487.1 | 30 | sp\|Q45460\|OPBA_BACSU CHOLINE TRANSPORT ATP-BINDING PROTEIN | |
| | | | OPUBA pir\|\|G69669 choline ABC transporter (ATP-binding protein) opuBA - | |
| | | | Bacillus subtilis gb\|AAC14356.1\| (AF008930) ATPase [Bacillus subtilis] | |
| | | | emb\|CAB15378.1\| (Z99121) choline ABC tr | |
| SEQ ID N^{o} 321 | LI-3180.1 | | No Hits found | |
| SEQ ID N^{o} 322 | LI-2997.1 | 44 | emb\|CAB53856.1\| (AJ242593) gp66 [Bacteriophage A118] | Length = 144 |
| SEQ ID N^{o} 323 | LI-6045.1 | 44 | emb\|CAB53856.1\| (AJ242593) gp66 [Bacteriophage A118] | Length = 144 |
| SEQ ID N^{o} 324 | LI-1517.1 | 40 | pir\|\|A28298 myosin heavy chain beta, cardiac muscle - golden hamster | Length = 974″ |
| | | | (fragment) emb\|CAA30256.1\| (X07273) beta-myosin heavy chain (974 AA); S2 | |
| | | | fragment and LMM region [Mesocricetus auratus] | |
| SEQ ID N^{o} 325 | LI-6006.2 | | | |
| SEQ ID N^{o} 326 | LI-3335.1 | 34 | gb\|AAF66771.1\|AF147806_35 (AF147806) major tegument protein [Gallid | Length = 3325 |
| | | | herpesvirus 2] | |
| SEQ ID N^{o} 327 | LI-51.1 | | No Hits found | |
| SEQ ID N^{o} 328 | LI-1931.1 | | No Hits found | |
| SEQ ID N^{o} 329 | LI-4521.1 | | No Hits found | |
| SEQ ID N^{o} 330 | LI-6028.1 | 51 | sp\|P45911\|YQAN_BACSU HYPOTHETICAL 16.1 KD PROTEIN IN SPOIIIC- | |
| | | | CWLA INTERGENIC REGION pir\|\|E69945 hypothetical protein yqaN - Bacillus | |
| | | | subtilis dbj\|BAA06928.1\| (D32216) ORF39 [Bacillus subtilis] dbj\|BAA12389.1\| | |
| | | | (D84432) YqaN [Bacillus subtilis] emb\|CAB1 | |
| SEQ ID N^{o} 331 | LI-3319.1 | | No Hits found | |
| SEQ ID N^{o} 332 | LI-4250.1 | | No Hits found | |
| SEQ ID N^{o} 333 | LI-108.1 | | No Hits found | |
| SEQ ID N^{o} 334 | LI-4959.1 | 41 | sp\|P54940\|YXEA_BACSU HYPOTHETICAL 13.0 KD PROTEIN IN IDH-DEOR | |
| | | | INTERGENIC REGION PRECURSOR pir\|\|C70074 hypothetical protein | |
| | | | yxeA - Bacillus subtilis dbj\|BAA08317.1\| (D45912) yxeA [Bacillus subtilis] | |
| | | | emb\|CAB15998.1\| (Z99124) yxeA [Bacillus sub | |
| SEQ ID N^{o} 335 | LI-846.1 | | No Hits found | |
| SEQ ID N^{o} 336 | LI-4170.1 | | No Hits found | |
| SEQ ID N^{o} 337 | LI-5577.1 | 83 | sp\|P45929\|YQBM_BACSU HYPOTHETICAL 16.3 KD PROTEIN IN SPOIIIC- | |
| | | | CWLA INTERGENIC REGION pir\|\|H69947 phage-related protein homolog yqbM - | |
| | | | Bacillus subtilis dbj\|BAA06945.1\| (D32216) ORF71 [Bacillus subtilis] | |
| | | | dbj\|BAA12408.1\| (D84432) YqbM [Bacillus subtilis] | |
| SEQ ID N^{o} 338 | LI-779.1 | 40 | pir\|\|F69168 hypothetical protein MTH520 - Methanobacterium | Length = 104 |
| | | | thermoautotrophicum (strain Delta H) gb\|AAB85026.1\| (AE000835) | |
| | | | unknown [Methanobacterium thermoautotrophicum] | |
| SEQ ID N^{o} 339 | LI-2822.1 | | No Hits found | |
| SEQ ID N^{o} 340 | LI-2931.1 | 83 | emb\|CAB53814.1\| (AJ242593) gp28 [Bacteriophage A118] | Length = 149 |
| SEQ ID N^{o} 341 | LI-2976.1 | | No Hits found | |
| SEQ ID N^{o} 342 | LI-3835.1 | 36 | emb\|CAB57639.1\| (Y18930) hypothetical protein [Sulfolobus solfataricus] | Length = 106 |
| SEQ ID N^{o} 343 | LI-3613.1 | | No Hits found | |
| SEQ ID N^{o} 344 | LI-3988.1 | 51 | emb\|CAB53821.1\| (AJ242593) gp35 [Bacteriophage A118] | Length = 163 |
| SEQ ID N^{o} 345 | LI-2287.1 | | No Hits found | |
| SEQ ID N^{o} 346 | LI-338.1 | | No Hits found | |
| SEQ ID N^{o} 347 | LI-4098.1 | 25 | pir\|\|I40868 hypothetical protein 3 nanH region - Clostridium perfringens | Length = 265 |
| | | | emb\|CAA60798.1\| (X87369) ORF3 [Clostridium perfringens] | |
| SEQ ID N^{o} 348 | LI-1716.1 | | No Hits found | |
| SEQ ID N^{o} 349 | LI-6063.1 | | No Hits found | |
| SEQ ID N^{o} 350 | LI-1117.1 | | No Hits found | |
| SEQ ID N^{o} 351 | LI-4137.1 | | No Hits found | |
| SEQ ID N^{o} 352 | LI-2778.1 | 33 | gb\|AAB60026.1\| (U09422) ORF7 [Enterococcus faecalis] prf\|\|2114402U ORF 7 | Length = 157 |
| | | | [Enterococcus faecalis] | |
| SEQ ID N^{o} 353 | LI-2783.1 | 47 | gb\|AAF41678.1\| (AE002479) transcriptional regulator, MerR family [Neisseria | Length = 135 |
| | | | meningitidis MC58] emb\|CAB84745.1\| (AL162756) putative transcriptional | |
| | | | regulator [Neisseria meningitidis] | |
| SEQ ID N^{o} 354 | LI-3846.1 | | No Hits found | |
| SEQ ID N^{o} 355 | LI-929.1 | | No Hits found | |
| SEQ ID N^{o} 356 | LI-664.1 | | No Hits found | |
| SEQ ID N^{o} 357 | LI-3625.1 | 51 | pir\|\|B70030 conserved hypothetical protein yvbK - Bacillus subtilis | Length = 155 |
| | | | emb\|CAB15394.1\| (Z99121) similar to hypothetical proteins from B. subtilis | |
| | | | [Bacillus subtilis] | |
| SEQ ID N^{o} 358 | LI-4119.1 | | No Hits found | |
| SEQ ID N^{o} 359 | LI-4479.1 | | No Hits found | |
| SEQ ID N^{o} 360 | LI-2939.1 | | No Hits found | |
| SEQ ID N^{o} 361 | LI-4012.1 | 52 | dbj\|BAA97823.1\| (AB044554) orf 16 [Staphylococcus aureus prophage phiPV83] | Length = 159 |
| SEQ ID N^{o} 362 | LI-5553.1 | | No Hits found | |
| SEQ ID N^{o} 363 | LI-5583.1 | 50 | sp\|P54330\|XKDJ_BACSU PHAGE-LIKE ELEMENT PBSX PROTEIN XKDJ | |
| | | | pir\|\|B69732 PBSX prophage ORF xkdJ - Bacillus subtilis emb\|CAA94065.1\| | |
| | | | (Z70177) homologous to yqbJ of the skin element [Bacillus subtilis] | |
| | | | emb\|CAB13121.1\| (Z99110) PBSX prophage [Bacillus subtil | |
| SEQ ID N^{o} 364 | LI-5612.2 | | | |
| SEQ ID N^{o} 365 | LI-4016.1 | 49 | gb\|AAC97922.1\| (AF077306) gp151 [Streptococcus thermophilus bacteriophage | Length = 151 |
| | | | Sfi19] gb\|AAD44072.1\|AF115102_31 (AF115102) orf151 gp [Streptococcus | |
| | | | thermophilus bacteriophage Sfi19] | |
| SEQ ID N^{o} 366 | LI-4193.1 | 78 | emb\|CAA63529.1\| (X92946) transposase [Lactococcus lactis] | Length = 228 |
| SEQ ID N^{o} 367 | LI-2609.1 | 26 | pir\|\|F72598 hypothetical protein APE1254 - Aeropyrum pernix (strain K1) | Length = 109 |
| | | | dbj\|BAA80244.1\| (AP000061) 109aa long hypothetical protein [Aeropyrum | |
| | | | pernix] | |
| SEQ ID N^{o} 368 | LI-2940.1 | | No Hits found | |
| SEQ ID N^{o} 369 | LI-4459.1 | | No Hits found | |
| SEQ ID N^{o} 370 | LI-5315.1 | 69 | sp\|O66911\|UVRA_AQUAE EXCINUCLEASE ABC SUBUNIT A pir\|\|C70360 | Length = 926 |
| | | | repair excision nuclease subunit A - Aquifex aeolicus gb\|AAC06874.1\| | |
| | | | (AE000702) repair excision nuclease subunit A [Aquifex aeolicus] | |
| SEQ ID N^{o} 371 | LI-5576.1 | 65 | sp\|P45930\|YQBN_BACSU HYPOTHETICAL 17.1 KD PROTEIN IN SPOIIIC- | |
| | | | CWLA INTERGENIC REGION pir\|\|A69948 phage-related protein homolog yqbN - | |
| | | | Bacillus subtilis dbj\|BAA0946.1\| (D32216) ORF55 [Bacillus subtilis] | |
| | | | dbj\|BAA12410.1\| (D84432) YqbN [Bacillus subtilis] | |
| SEQ ID N^{o} 372 | LI-5578.1 | | No Hits found | |
| SEQ ID N^{o} 373 | LI-2967.1 | | No Hits found | |
| SEQ ID N^{o} 374 | LI-2836.1 | 38 | pir\|\|H72608 hypothetical protein APE1334 - Aeropyrum pernix (strain K1) | Length = 211 |
| | | | dbj\|BAA80326.1\| (AP000061) 211aa long hypothetical protein [Aeropyrum | |
| | | | pernix] | |
| SEQ ID N^{o} 375 | LI-3370.1 | | No Hits found | |
| SEQ ID N^{o} 376 | LI-5584.1 | 70 | sp\|P45925\|YQBI_BACSU HYPOTHETICAL 19.9 KD PROTEIN IN SPOIIIC- | |
| | | | CWLA INTERGENIC REGION pir\|\|D69947 phage-related protein homolog yqbl - | |
| | | | Bacillus subtilis dbj\|BAA06941.1\| (D32216) ORF67 [Bacillus subtilis] | |
| | | | dbj\|BAA12404.1\| (D84432) Yqbl [Bacillus subtilis] | |
| SEQ ID N^{o} 377 | LI-5801.1 | 67 | gb\|AAF04740.1\| (AF102169) multidrug resistance-like protein [Listeria | Length = 228 |
| | | | monocytogenes] | |
| SEQ ID N^{o} 378 | LI-3338.1 | 42 | pir\|\|T33369 hypothetical protein H02F09.3 - Caenorhabditis elegans | Length = 1275 |
| | | | gb\|AAC64622.1\| (AF077538) unknown [Caenorhabditis elegans] | |
| SEQ ID N^{o} 379 | LI-4106.1 | 65 | sp\|Q99338\|ISTB_BACTB INSERTION SEQUENCE IS232 PUTATIVE ATP- | Length = 250 |
| | | | BINDING PROTEIN pir\|\|B37801 IstB protein homolog - Bacillus thuringiensis | |
| | | | gb\|AAA98141.1\| (M38370) ORF2 [Insertion sequence IS232] | |
| SEQ ID N^{o} 380 | LI-4155.1 | 21 | pir\|\|F72491 hypothetical protein APE2573 - Aeropyrum pernix (strain K1) | Length = 238 |
| | | | dbj\|BAA81590.1\| (AP000064) 238aa long hypothetical protein [Aeropyrum | |
| | | | pernix] | |
| SEQ ID N^{o} 381 | LI-2451.1 | | No Hits found | |
| SEQ ID N^{o} 382 | LI-3987.1 | | No Hits found | |
| SEQ ID N^{o} 383 | LI-4474.1 | | No Hits found | |
| SEQ ID N^{o} 384 | LI-494.1 | 42 | gb\|AAF41678.1\| (AE002479) transcriptional regulator, MerR family [Neisseria | Length = 135 |
| | | | meningitidis MC58] emb\|CAB84745.1\| (AL162756) putative transcriptional | |
| | | | regulator [Neisseria meningitidis] | |
| SEQ ID N^{o} 385 | LI-2964.1 | | No Hits found | |
| SEQ ID N^{o} 386 | LI-6202.1 | | | |
| SEQ ID N^{o} 387 | LI-2102.1 | | No Hits found | |
| SEQ ID N^{o} 388 | LI-1260.1 | | No Hits found | |
| SEQ ID N^{o} 389 | LI-2820.1 | 94 | gb\|AAF04738.1\| (AF102167) stress protein-like protein [Listeria monocytogenes] | Length = 174 |
| SEQ ID N^{o} 390 | LI-3283.1 | | No Hits found | |
| SEQ ID N^{o} 391 | LI-3378.1 | | No Hits found | |
| SEQ ID N^{o} 392 | LI-6009.2 | | | |
| SEQ ID N^{o} 393 | LI-624.1 | | No Hits found | |
| SEQ ID N^{o} 394 | LI-2969.1 | | No Hits found | |
| SEQ ID N^{o} 395 | LI-2999.1 | | No Hits found | |
| SEQ ID N^{o} 396 | LI-4003.1 | | No Hits found | |
| SEQ ID N^{o} 397 | LI-6109.1 | | No Hits found | |
| SEQ ID N^{o} 398 | LI-4081.1 | 61 | emb\|CAB83893.1\| (AL162753) hypothetical protein NMA0603 [Neisseria | Length = 182 |
| | | | meningitidis] | |
| SEQ ID N^{o} 399 | LI-4696.1 | 67 | sp\|P96674\|YDEQ_BACSU PUTATIVE NAD(P)H OXIDOREDUCTASE YDEQ | |
| | | | pir\|\|C69779 NAD(P)H oxidoreductase homolog ydeQ - Bacillus subtilis | |
| | | | dbj\|BAA19364.1\| (AB001488) PROBABLE NAD(P)H OXIDOREDUCTASE. | |
| | | | [Bacillus subtilis] emb\|CAB12337.1\| (Z99106) similar to NAD(P)H ox | |
| SEQ ID N^{o} 400 | LI-3361.1 | 87 | emb\|CAB53787.1\| (AJ242593) putative terminase small subunit [Bacteriophage | Length = 180 |
| | | | A118] | |
| SEQ ID N^{o} 401 | LI-2383.1 | 25 | gb\|AAC45309.1\| (U81957) putative DNA binding protein [Streptococcus gordonii] | Length = 122 |
| SEQ ID N^{o} 402 | LI-2787.1 | | No Hits found | |
| SEQ ID N^{o} 403 | LI-4184.1 | 72 | gb\|AAB91419.1\| (AF037091) RepB homolog [Lactobacillus rhamnosus] | Length = 172 |
| SEQ ID N^{o} 404 | LI-4150.1 | 89 | sp\|P19241\|BINR_STAAU DNA-INVERTASE BINR (TRANSPOSON TN552) | Length = 192 |
| | | | pir\|\|S16509 DNA-invertase - Staphylococcus aureus transposon Tn552 | |
| | | | gb\|AAA26640.1\| (M36694) DNA invertase (ttg start codon) [Staphylococcus | |
| | | | aureus] | |
| SEQ ID N^{o} 405 | LI-1323.1 | | No Hits found | |
| SEQ ID N^{o} 406 | LI-3996.1 | | No Hits found | |
| SEQ ID N^{o} 407 | LI-5572.1 | 41 | pir\|\|S49915 extensin-like protein - maize emb\|CAA84230.1\| (Z34465) extensin- | Length = 1188 |
| | | | like protein [Zea mays] prf\|\|2111476A extensin-like domain [Zea mays] | |
| SEQ ID N^{o} 408 | LI-4485.1 | | No Hits found | |
| SEQ ID N^{o} 409 | LI-6029.1 | | No Hits found | |
| SEQ ID N^{o} 410 | LI-6076.1 | 35 | pir\|\|S00250 myosin heavy chain - slime mold (Dictyostelium discoideum) | Length = 160 |
| | | | (fragment) | |
| SEQ ID N^{o} 411 | LI-4309.1 | | No Hits found | |
| SEQ ID N^{o} 412 | LI-4140.1 | 83 | gb\|AAF86683.1\| (AF179848) unknown [Lactococcus lactis subsp. lactis] | Length = 196 |
| SEQ ID N^{o} 413 | LI-6189.2 | | | |
| SEQ ID N^{o} 414 | LI-1239.1 | | No Hits found | |
| SEQ ID N^{o} 415 | LI-4079.1 | 57 | emb\|CAB83894.1\| (AL162753) hypothetical protein NMA0604 [Neisseria | Length = 187 |
| | | | meningitidis] | |
| SEQ ID N^{o} 416 | LI-4046.1 | 38 | pir\|\|T13523 hypothetical protein 34 - Bacillus phage phi-105 dbj\|BAA36640.1\| | Length = 200 |
| | | | (AB016282) ORF34 [bacteriophage phi-105] | |
| SEQ ID N^{o} 417 | LI-5934.1 | | No Hits found | |
| SEQ ID N^{o} 418 | LI-2998.1 | 35 | pir\|\|T13190 hypothetical protein R242 - Lactobacillus phage phi-gle | Length = 242 |
| | | | emb\|CAA66766.1\| (X98106) Rorf242 [Bacteriophage phig1e] | |
| SEQ ID N^{o} 419 | LI-304.1 | 20 | emb\|CAA49825.1\| (X70360) ORF2 [Azospirillum brasilense] | Length = 173 |
| SEQ ID N^{o} 420 | LI-4945.1 | | No Hits found | |
| SEQ ID N^{o} 421 | LI-1552.1 | 29 | dbj\|BAA82251.1\| (AB014440) orf3 [Staphylococcus aureus] | Length = 151 |
| SEQ ID N^{o} 422 | LI-4037.1 | 51 | dbj\|BAA97848.1\| (AB044554) orf 41 ˜phi PVL orf 5 and 6 [Staphylococcus | Length = 194 |
| | | | aureus prophage phiPV83] | |
| SEQ ID N^{o} 423 | LI-5108.1 | 38 | sp\|P54396\|YPMB_BACSU HYPOTHETICAL 17.9 KD PROTEIN IN DING-ASPB | |
| | | | INTERGENIC REGION pir\|\|F69938 hypothetical protein ypmB - Bacillus subtilis | |
| | | | gb\|AAB38453.1\| (L47709) putative [Bacillus subtilis] emb\|CAB14154.1\| (Z99115) | |
| | | | ypmB [Bacillus subtilis] | |
| SEQ ID N^{o} 424 | LI-5561.1 | 53 | sp\|P54340\|XKDU_BACSU PHAGE-LIKE ELEMENT PBSX PROTEIN XKDT | |
| | | | pir\|\|D69733 PBSX prophage ORF xkdU - Bacillus subtilis emb\|CAA94042.1\| | |
| | | | (Z70177) homologous to yqcA of the skin element [Bacillus subtilis] | |
| | | | emb\|CAB13131.1\| (Z99110) PBSX prophage [Bacillus subtil | |
| SEQ ID N^{o} 425 | LI-1717.1 | | No Hits found | |
| SEQ ID N^{o} 426 | LI-6043.1 | 34 | pir\|\|T13190 hypothetical protein R242 - Lactobacillus phage phi-gle | Length = 242 |
| | | | emb\|CAA66766.1\| (X98106) Rorf242 [Bacteriophage phig 1e] | |
| SEQ ID N^{o} 427 | LI-3740.1 | 44 | sp\|P46330\|YXBF_BACSU HYPOTHETICAL 44.3 KDA PROTEIN IN HTPG- | |
| | | | ALDX INTERGENIC REGION pir\|\|A70073 hypothetical protein yxbF - Bacillus | |
| | | | subtilis dbj\|BAA21600.1\| (AB005554) yxbF [Bacillus subtilis] emb\|CAB16021.1\| | |
| | | | (Z99124) alternate gene name: yxaT [Bacillus | |
| SEQ ID N^{o} 428 | LI-6087.1 | 49 | sp\|P39784\|PCF_BACSU POSITIVE CONTROL FACTOR pir\|\|I40413 positive | |
| | | | control factor (xre region) xpf - Bacillus subtilis emb\|CAA84046.1\| (Z34287) | |
| | | | ORF7; homology to regions 4.1 and 4.2 of sigma factors [Bacillus subtilis] | |
| | | | emb\|CAA94057.1\| (Z70177) | |
| SEQ ID N^{o} 429 | LI-2151.1 | | No Hits found | |
| SEQ ID N^{o} 430 | LI-4097.1 | | No Hits found | |
| SEQ ID N^{o} 431 | LI-4146.1 | 78 | gb\|AAB08926.1\| (U39859) invertase-enterococcal [Enterococcus faecalis] | Length = 202 |
| SEQ ID N^{o} 432 | LI-1236.1 | | No Hits found | |
| SEQ ID N^{o} 433 | LI-3291.1 | | No Hits found | |
| SEQ ID N^{o} 434 | LI-4512.1 | 30 | pir\|\|F71011 hypothetical protein PH1388 - Pyrococcus horikoshii | Length = 119 |
| | | | dbj\|BAA30494.1\| (AP000006) 119aa long hypothetical protein [Pyrococcus | |
| | | | horikoshii] | |
| SEQ ID N^{o} 435 | LI-4120.1 | 32 | gb\|AAC17959.1\| (AF022806) unknown [Pantoea citrea] | Length = 208 |
| SEQ ID N^{o} 436 | LI-4223.1 | 35 | emb\|CAB88960.1\| (AL353864) hypothetical protein SC8F11.09. [Streptomyces | Length = 137 |
| | | | coelicolor A3(2)] | |
| SEQ ID N^{o} 437 | LI-6183.2 | | | |
| SEQ ID N^{o} 438 | LI-1345.1 | 43 | emb\|CAB75242.1\| (AL139075) putative penplasmic protein [Campylobacter | Length = 390 |
| | | | jejuni] | |
| SEQ ID N^{o} 439 | LI-3379.1 | 67 | emb\|CAB53841.1\| (AJ242593) gp51 [Bacteriophage A118] | Length = 186 |
| SEQ ID N^{o} 440 | LI-5543.1 | | No Hits found | |
| SEQ ID N^{o} 441 | LI-6018.1 | 47 | gb\|AAF43118.1\|AF208055_5 (AF208055) Orf245 [bacteriophage phi31.1] | |
| | | | gb\|AAF74061.1\| (AF212844) ORF245 [Lactococcus lactis] gb\|AAF74095.1\| | |
| | | | (AF212846) ORF245 [Lactococcus lactis bacteriophage ul36.1] gb\|AAF74110.1\| | |
| | | | (AF212847) ORF245 [Lactococcus lactis bac | |
| SEQ ID N^{o} 442 | LI-1951.1 | | No Hits found | |
| SEQ ID N^{o} 443 | LI-4535.1 | | No Hits found | |
| SEQ ID N^{o} 444 | LI-1171.1 | 37 | gb\|AAF36806.1\| (AF155139) VanZF [Paenibacillus popilliae] | Length = 206 |
| SEQ ID N^{o} 445 | LI-1215.1 | 59 | pir\|\|A69898 conserved hypothetical protein yoaZ - Bacillus subtilis | Length = 210 |
| | | | gb\|AAB84456.1\| (AF027868) YoaZ [Bacillus subtilis] emb\|CAB13771.1\| | |
| | | | (Z99114) similar to hypothetical proteins from B. subtilis [Bacillus subtilis] | |
| SEQ ID N^{o} 446 | LI-4153.1 | 64 | sp\|P94606\|ATKC_CLOAB POTASSIUM-TRANSPORTING ATPASE C CHAIN | Length = 204 |
| | | | (ATP PHOSPHOHYDROLASE [POTASSIUM-TRANSPORTING] C | |
| | | | CHAIN) gb\|AAC45479.1\| (U44892) KdpC [Clostridium acetobutylicum] | |
| SEQ ID N^{o} 447 | LI-2943.1 | | No Hits found | |
| SEQ ID N^{o} 448 | LI-2942.1 | | No Hits found | |
| SEQ ID N^{o} 449 | LI-1120.1 | 35 | sp\|P31078\|PETP_RHOCA PETP PROTEIN pir\|\|S22631 petP protein - | Length = 166 |
| | | | Rhodobacter capsulatus emb\|CAA78097.1\| (Z12113) protein of unknown | |
| | | | function [Rhodobacter capsulatus] | |
| SEQ ID N^{o} 450 | LI-4532.1 | | No Hits found | |
| SEQ ID N^{o} 451 | LI-3387.1 | 99 | emb\|CAB53838.1\| (AJ242593) putative recombinase [Bacteriophage A118] | Length = 177 |
| SEQ ID N^{o} 452 | LI-1125.1 | 34 | gb\|AAC978451\| (AF063866) ORF MSV027 tryptophan repeat gene family | Length = 297 |
| | | | protein [Melanoplus sanguinipes entomopoxvirus] | |
| SEQ ID N^{o} 453 | LI-4217.1 | | No Hits found | |
| SEQ ID N^{o} 454 | LI-5704.1 | | No Hits found | |
| SEQ ID N^{o} 455 | LI-2923.1 | 41 | gb\|AAC440021.1\| (U40830) Orf14.9 protein [Streptococcus thermophilus] | Length = 191 |
| | | | prf\|\|2209356Q ORF 14.9 [Streptococcus thermophilus] | |
| SEQ ID N^{o} 456 | LI-1393.1 | | No Hits found | |
| SEQ ID N^{o} 457 | LI-2461.1 | 39 | gb\|AAC44021.1\| (U40830) Orf14.9 protein [Streptococcus thermophilus] | Length = 191 |
| | | | prf\|\|2209356Q ORE 14.9 [Streptococcus thermophilus] | |
| SEQ ID N^{o} 458 | LI-5483.1 | 14 | sp\|P05790\|FBOH_BOMMO FIBROIN HEAVY CHAIN PRECURSOR (FIB-H) (H- | Length = 5263 |
| | | | FIBROIN) gb\|AAF76983.1\|AF226688_1 (AF226688) fibroin heavy chain Fib-H | |
| | | | [Bombyx mori] | |
| SEQ ID N^{o} 459 | LI-392.1 | 49 | emb\|CAB73650.1\| (AL139079) putative ABC transport system ATP-binding | Length = 217 |
| | | | protein [Campylobacter jejuni] | |
| SEQ ID N^{o} 460 | LI-2950.1 | | No Hits found | |
| SEQ ID N^{o} 461 | LI-6003.1 | 48 | pir\|\|B69784 conserved hypothetical protein ydhF - Bacillus subtilis | Length = 236 |
| | | | emb\|CAB12392.1\| (Z99107) similar to hypothetical proteins from B. subtilis | |
| | | | [Bacillus subtilis] | |
| SEQ ID N^{o} 462 | LI-6065.1 | | No Hits found | |
| SEQ ID N^{o} 463 | LI-1578.1 | 49 | sp\|P46903\|NATA_BACSU ATP-BINDING TRANSPORT PROTEIN NATA (NA+ | |
| | | | ABC TRANSPORTER) pir\|\|A69666 Na+ ABC transporter (extrusion) (ATP- | |
| | | | binding protein) natA - Bacillus subtilis gb\|AAB53022.1\| (U30873) NatA | |
| | | | [Bacillus subtilis] dbj\|BAA22236.1\| (AB0006 | |
| SEQ ID N^{o} 464 | LI-4124.1 | 82 | gb\|AAC64335.1\| (AF036485) putative transposase [Plasmid pNZ4000] | Length = 226 |
| SEQ ID N^{o} 465 | LI-4139.1 | 82 | gb\|AAC64335.1\| (AF036485) putative transposase [Plasmid pNZ4000] | Length = 226 |
| SEQ ID N^{o} 466 | LI-4166.1 | 94 | emb\|CAA64387.1\| (X94761) transposase [Streptococcus thermophilus] | Length = 226 |
| | | | emb\|CAB52228.1\| (Z98171) transposase [Streptococcus thermophilus] | |
| SEQ ID N^{o} 467 | LI-4182.1 | 82 | gb\|AAC64335.1\| (AF036485) putative transposase [Plasmid pNZ4000] | Length = 226 |
| SEQ ID N^{o} 468 | LI-6038.1 | | No Hits found | |
| SEQ ID N^{o} 469 | LI-4021.1 | | No Hits found | |
| SEQ ID N^{o} 470 | LI-5569.1 | 66 | sp\|P45932\|YQBP_BACSU HYPOTHETICAL 25.3 KD PROTEIN IN SPOIIIC- | |
| | | | CWLA INTERGENIC REGION pir\|\|C69948 phage-related protein homolog yqbP - | |
| | | | Bacillus subtilis dbj\|BAA06948.1\| (D32216) ORF85 [Bacillus subtilis] | |
| | | | dbj\|BAA12412.1\| (D84432) YqbP [Bacillus subtilis] | |
| SEQ ID N^{o} 471 | LI-4084.1 | 96 | emb\|CAA63529.1\| (X92946) transposase [Lactococcus lactis] | Length = 228 |
| SEQ ID N^{o} 472 | LI-4177.1 | 97 | emb\|CAA63529.1\| (X92946) transposase [Lactococcus lactis] | Length = 228 |
| SEQ ID N^{o} 473 | LI-6066.1 | 23 | emb\|CAB53799.1\| (AJ242593) gp13 [Bacteriophage A118] | Length = 110 |
| SEQ ID N^{o} 474 | LI-6106.1 | 97 | emb\|CAA63529.1\| (X92946) transposase [Lactococcus lactis] | Length = 228 |
| SEQ ID N^{o} 475 | LI-6113.1 | 97 | emb\|CAA63529.1\| (X92946) transposase [Lactococcus lactis] | Length = 228 |
| SEQ ID N^{o} 476 | LI-4013.1 | 64 | gb\|AAC48871.1\| (U51128) ORF245 [Lactococcus bacteriophage phi31] | Length = 245 |
| SEQ ID N^{o} 477 | LI-5978.1 | 61 | emb\|CAB40581.1\| (AJ010128) DNA alkylation repair enzyme [Bacillus cereus] | Length = 237 |
| SEQ ID N^{o} 478 | LI-6085.1 | 53 | sp\|P45915\|YQAS_BACSU HYPOTHETICAL 27.7 KD PROTEIN IN SPOIIIC- | |
| | | | CWLA INTERGENIC REGION pir\|\|B69946 phage-related terminase small | |
| | | | subunit homolog yqaS - Bacillus subtilis dbj\|BAA06932.1\| (D32216) | |
| | | | ORF43 [Bacillus subtilis] dbj\|BAA12394.1\| (D84432 | |
| SEQ ID N^{o} 479 | LI-1346.1 | 15 | pir\|\|E75471 transcription regulator, GntR family - Deinococcus radiodurans | Length = 267 |
| | | | (strain R1) gb\|AAF10394.1\|AE001936_3 (AE001936) transcriptional regulator, | |
| | | | GntR family [Deinococcus radiodurans] | |
| SEQ ID N^{o} 480 | LI-4506.1 | | No Hits found | |
| SEQ ID N^{o} 481 | LI-3994.1 | 54 | gb\|AAB18697.1\| (U38906) ORF22 [Bacteriophage r1t] | Length = 228 |
| SEQ ID N^{o} 482 | LI-6131.1 | 54 | gb\|AAB18697.1\| (U38906) ORF22 [Bacteriophage r1t] | Length = 228 |
| SEQ ID N^{o} 483 | LI-4050.1 | | No Hits found | |
| SEQ ID N^{o} 484 | LI-284.1 | 57 | pir\|\|F69375 ABC transporter, ATP-binding protein homolog - Archaeoglobus | Length = 285 |
| | | | fulgidus gb\|AAB90232.1\| (AE001034) ABC transporter, ATP-binding protein | |
| | | | [Archaeoglobus fulgidus] | |
| SEQ ID N^{o} 485 | LI-4160.1 | 65 | gb\|AAB39096.1\| (U39673) KdpE [Clostridium acetobutylicum] | Length = 232 |
| SEQ ID N^{o} 486 | LI-529.1 | 47 | dbj\|BAA03592.1\| (D14877) positive regulator for virulence factors [Clostridium | Length = 236 |
| | | | perfringens] | |
| SEQ ID N^{o} 487 | LI-3559.1 | | No Hits found | |
| SEQ ID N^{o} 488 | LI-5643.1 | 49 | pir\|\|D49898 cellobiose phosphotransferase system celC - Bacillus | Length = 245 |
| | | | stearothermophilus gb\|AAA17391.1\| (U07818) putative phospho-beta- | |
| | | | glucosidase [Bacillus stearothermophilus] | |
| SEQ ID N^{o} 489 | LI-5720.1 | 90 | emb\|CAB53837.1\| (AJ242593) gp47 [Bacteriophage A118] | Length = 319 |
| SEQ ID N^{o} 490 | LI-2788.1 | 46 | gbj\|AAF35174.1\| (AF193610) TndX [Clostridium difficile] | Length = 533 |
| SEQ ID N^{o} 491 | LI-4054.1 | 28 | emb\|CAB52531.1\| (AJ131519) hypothetical protein [Lactobacillus bacteriophage | Length = 247 |
| | | | phi adh] | |
| SEQ ID N^{o} 492 | LI-4095.1 | 47 | pir\|\|E71905 hypothetical protein jhp0651 - Helicobacter pylori (strain J99) | Length = 234 |
| | | | gb\|AAD06227.1\| (AE001497) putative [Helicobacter pylori J99] | |
| SEQ ID N^{o} 493 | LI-5200.1 | 34 | prf\|\|2119294A YFW1 gene [Saccharomyces cerevisiae] | Length = 605 |
| SEQ ID N^{o} 494 | LI-2995.1 | 52 | pir\|\|T12864 probable antirepressor - Bacillus subtilis phage SPBc2 | |
| | | | emb\|CAB13959.1\| (Z99114) similar to phage-related DNA-binding protein | |
| | | | anti-repressor [Bacillus subtilis] emb\|CAB13985.1\| (Z99115) similar to phage- | |
| | | | related DNA-binding protein | |
| SEQ ID N^{o} 495 | LI-5715.1 | 58 | dbj\|BAA97816.1\| (AB044554) antirepressor [Staphylococcus aureus prophage | Length = 265 |
| | | | phiPV83] | |
| SEQ ID N^{o} 496 | LI-6019.1 | 38 | pir\|\|T00178 hypothetical protein 44 - Staphylococcus aureus phage phi PVL | Length = 161 |
| | | | dbj\|BAA31918.1\| (AB009866) orf 44 [bacteriophage phi PVL] | |
| SEQ ID N^{o} 497 | LI-2779.1 | 27 | pir\|\|G69486 probable iron-sulfur flavoprotein isf-3 - Archaeoglobus fulgidus | Length = 201 |
| | | | gb\|AAB89371.1\| (AE000972) iron-sulfur flavoprotein (isf-3) [Archaeoglobus | |
| | | | fulgidus] | |
| SEQ ID N^{o} 498 | LI-6144.1 | 69 | dbj\|BAA97816.1\| (AB044554) antirepressor [Staphylococcus aureus prophage | Length = 265 |
| | | | phiPV83] | |
| SEQ ID N^{o} 499 | LI-1926.1 | | No Hits found | |
| SEQ ID N^{o} 500 | LI-4026.1 | | No Hits found | |
| SEQ ID N^{o} 501 | LI-1388.1 | | No Hits found | |
| SEQ ID N^{o} 502 | LI-2781.1 | 47 | pir\|\|E70761 probable ketoacyl reductase - Mycobacterium tuberculosis (strain | Length = 267 |
| | | | H37RV) emb\|CAA98318.1\| (Z74020) hypothetical protein Rv1544 | |
| | | | [Mycobacterium tuberculosis] | |
| SEQ ID N^{o} 503 | LI-3157.1 | 38 | pir\|\|G75518 probable beta-lactamase - Deinococcus radiodurans (strain R1) | Length = 277 |
| | | | gb\|AAF10013.1\|AE001903_1 (AE001903) beta-lactamase, putative | |
| | | | [Deinococcus radiodurans] | |
| SEQ ID N^{o} 504 | LI-485.1 | 46 | pir\|\|H71283 conserved hypothetical integral membrane protein TP0771 - syphilis | Length = 593 |
| | | | spirochete gb\|AAC65739.1\| (AE001248) conserved hypothetical integral | |
| | | | membrane protein [Treponema pallidum] | |
| SEQ ID N^{o} 505 | LI-5604.1 | 31 | sp\|P45915\|YQAS_BACSU HYPOTHETICAL 27.7 KD PROTEIN IN SPOIIIC- | |
| | | | CWLA INTERGENIC REGION pir\|\|B69946 phage-related terminase small | |
| | | | subunit homolog yqaS - Bacillus subtilis dbj\|BAA06932.1\| (D32216) | |
| | | | ORF43 [Bacillus subtilis] dbj\|BAA12394.1\| (D84432 | |
| SEQ ID N^{o} 506 | LI-4169.1 | | No Hits found | |
| SEQ ID N^{o} 507 | LI-522.1 | 40 | ref\|NP_013953.1\| Ymr226cp sp\|Q05016\|YM71_YEAST HYPOTHETICAL | |
| | | | OXIDOREDUCTASE IN MRPL44-MTF1 INTERGENIC REGION pir\|\|S57593 | |
| | | | hypothetical protein YMR226c - yeast (Saccharomyces cerevisiae) | |
| | | | emb\|CAA90197.1\| (Z49939) unknown [Saccharomyces cerevisiae] | |
| SEQ ID N^{o} 508 | LI-1513.1 | | No Hits found | |
| SEQ ID N^{o} 509 | LI-6136.1 | 98 | emb\|CAB53838.1\| (AJ242593) putative recombinase [Bacteriophage A118] | Length = 271 |
| SEQ ID N^{o} 510 | LI-3148.1 | 75 | pir\|\|S16647 sporulation dipeptide ABC transporter dppA - Bacillus subtilis | Length = 274 |
| SEQ ID N^{o} 511 | LI-5558.1 | | No Hits found | |
| SEQ ID N^{o} 512 | LI-4123.1 | 68 | gb\|AAB01067.1\| (U23813) transposase [Lactococcus lactis] | Length = 385 |
| SEQ ID N^{o} 513 | LI-6052.1 | 33 | emb\|CAB53803.1\| (AJ242593) gp17 [Bacteriophage A118] | Length = 272 |
| SEQ ID N^{o} 514 | LI-1577.1 | 42 | pir\|\|B71197 hypothetical protein PH1848 - Pyrococcus horikoshii | Length = 255 |
| | | | dbj\|BAA30969.1\| (AP000007) 255aa long hypothetical protein [Pyrococcus | |
| | | | horikoshii] | |
| SEQ ID N^{o} 515 | LI-3333.1 | 61 | emb\|CAB53803.1\| (AJ242593) gp17 [Bacteriophage A118] | Length = 272 |
| SEQ ID N^{o} 516 | LI-523.1 | 37 | pir\|\|B59099 hypothetical protein pXO1-66 - Bacillus anthracis virulence plasmid | Length = 361 |
| | | | pXO1 gb\|AAD32370.1\|AAD32370 (AF065404) pXO1-66 [Bacillus anthracis] | |
| SEQ ID N^{o} 517 | LI-1025.1 | | No Hits found | |
| SEQ ID N^{o} 518 | LI-2947.1 | | No Hits found | |
| SEQ ID N^{o} 519 | LI-5550.1 | 30 | pir\|\|T12790 N-acetylmuramoyl-L-alanine amidase homolog - Bacillus subtilis | |
| | | | phage SPBc2 emb\|CAB14059.1\| (Z99115) similar to N-acetylmuramoyl-L- | |
| | | | alanine amidase [Bacillus subtilis] gb\|AAC38300.1\| (AF021803) N- | |
| | | | acetylmuramoyl-L-alanine | |
| SEQ ID N^{o} 520 | LI-733.1 | 20 | pir\|\|A71161 hypothetical protein PH0486 - Pyrococcus horikoshii | Length = 170 |
| | | | dbj\|BAA29574.1\| (AP000002) 170aa long hypothetical protein [Pyrococcus | |
| | | | horikoshii] | |
| SEQ ID N^{o} 521 | LI-4067.1 | 39 | gb\|AAA63619.1\| (U10992) abiD [Lactococcus lactis] | Length = 366 |
| SEQ ID N^{o} 522 | LI-4670.1 | 50 | emb\|CAA78595.1\| (Z14225) SpoIIIJ [Bacillus subtilis] | Length = 259 |
| SEQ ID N^{o} 523 | LI-4460.1 | | No Hits found | |
| SEQ ID N^{o} 524 | LI-4174.1 | 61 | gb\|AAF37879.1\|AF234619_2 (AF234619) OpuABC [Lactococcus lactis] | Length = 573 |
| SEQ ID N^{o} 525 | LI-4148.1 | 66 | sp\|P18179\|ATBP_STAAU POTENTIAL ATP-BINDING PROTEIN (ORF 271) | |
| | | | pir\|\|S11779 probable ATP-binding protein - Staphylococcus aureus transposon | |
| | | | Tn552 emb\|CAA36948.1\| (X52734) ORF271 (pot. ATP-binding protein) (AA 1-271) | |
| | | | [Staphylococcus au | |
| SEQ ID N^{o} 526 | LI-454.1 | | No Hits found | |
| SEQ ID N^{o} 527 | LI-3320.1 | 97 | sp\|Q37979\|AEPE_BPA50 L-ALANOYL-D-GLUTAMATE PEPTIDASE | Length = 289 |
| | | | pir\|\|S69801 L-alanoyl-D-glutamate peptidase, 33.4 K - phage A500 | |
| | | | emb\|CAA59365.1\| (X85009) L-alanoyl-D-glutamate peptidase [Bacteriophage | |
| | | | A500] | |
| SEQ ID N^{o} 528 | LI-36.1 | 26 | gi\|6324372 anchorage subunit of a-agglutinin; Aga1p sp\|P32323\|AGA1_YEAST | |
| | | | A-AGGLUTININ ATTACHMENT SUBUNIT PRECURSOR pir\|\|A41258 a- | |
| | | | agglutinin core protein AGA1 - yeast (Saccharomyces cerevisiae) | |
| | | | gb\|AAA34382.1\| (M60590) a-agglutinin core subunit [Saccharo | |
| SEQ ID N^{o} 529 | LI-6075.1 | 32 | pir\|\|H45691 main capsid protein Gp34 - Lactobacillus delbrueckii subsp. | Length = 286 |
| | | | bulgaricus phage mv4 | |
| SEQ ID N^{o} 530 | LI-781.1 | 49 | gb\|AAC56014.1\| (AE001272) conserved hypothetical protein [Lactococcus lactis] | Length = 286 |
| SEQ ID N^{o} 531 | LI-4053.1 | | No Hits found | |
| SEQ ID N^{o} 532 | LI-6025.1 | 42 | dbj\|BAA97828.1\| (AB044554) orf 21 [Staphylococcus aureus prophage phiPV83] | Length = 257 |
| SEQ ID N^{o} 533 | LI-2966.1 | 32 | gb\|AAC24147.1\| (AF071201) unknown [bacteriophage Felix 01] | Length = 262 |
| SEQ ID N^{o} 534 | LI-4130.1 | 59 | pir\|\|B47092 copy control protein repB - Enterococcus faecalis plasmid pAD1 | Length = 281 |
| | | | gb\|AAB00504.1\| (L01794) replication-associated protein [Enterococcus faecalis] | |
| SEQ ID N^{o} 535 | LI-3354.1 | 96 | emb\|CAB53792.1\| (AJ242593) major capsid protein [Bacteriophage A118] | Length = 299 |
| SEQ ID N^{o} 536 | LI-2957.1 | 19 | gb\|AAC99858.1\| (U31159) CR16 [Rattus norvegicus] gb\|AAC99859.1\| (U31169) | Length = 485 |
| | | | SH3 domain binding protein [Rattus norvegicus] | |
| SEQ ID N^{o} 537 | LI-2975.1 | 40 | gb\|AAF84386.1\|AE003986_16 (AE003986) hypothetical protein [Xylella | Length = 327 |
| | | | fastidiosa] gb\|AAF84491.1\|AE003993_10 (AE003993) hypothetical protein | |
| | | | [Xylella fastidiosa] | |
| SEQ ID N^{o} 538 | LI-4138.1 | 48 | gb\|AAC56014.1\| (AE001272) conserved hypothetical protein [Lactococcus lactis] | Length = 286 |
| SEQ ID N^{o} 539 | LI-5052.1 | 48 | pir\|\|B70067 hypothetical protein ywqG - Bacillus subtilis emb\|CAB07445.1\| | Length = 261 |
| | | | (Z92952) unknown [Bacillus subtilis] emb\|CAB15639.1\| (Z99122) ywqG [Bacillus | |
| | | | subtilis] | |
| SEQ ID N^{o} 540 | LI-3386.1 | 67 | emb\|CAB53839.1\| (AJ242593) gp49 [Bacteriophage A118] | Length = 310 |
| SEQ ID N^{o} 541 | LI-2987.1 | 34 | sp\|P45915\|YQAS_BACSU HYPOTHETICAL 27.7 KD PROTEIN IN SPOIIIC- | |
| | | | CWLA INTERGENIC REGION pir\|\|B69946 phage-related terminase small | |
| | | | subunit homolog yqaS - Bacillus subtilis dbj\|BAA06932.1\| (D32216) | |
| | | | ORF43 [Bacillus subtilis] dbj\|BAA12394.1\| (D84432) | |
| SEQ ID N^{o} 542 | LI-395.1 | 29 | gb\|AAB49627.1\| (U63134) the 5′ end of the open reading frame shows similarity | Length = 252 |
| | | | to the rgg protein of Streptococcus gordonii, Swiss-Prot Accession | |
| | | | Number P49330 [Streptococcus pyogenes] | |
| SEQ ID N^{o} 543 | LI-3159.1 | 47 | pir\|\|A69856 polysugar degrading enzyme homolog ykfC - Bacillus subtilis | Length = 296 |
| | | | emb\|CAA05579.1\| (AJ002571) YkfC [Bacillus subtilis] emb\|CAB13156.1\| | |
| | | | (Z99110) similar to polysugar degrading enzyme [Bacillus subtilis] | |
| SEQ ID N^{o} 544 | LI-5590.1 | 81 | sp\|P45921\|YQBE_BACSU HYPOTHETICAL 34.5 KD PROTEIN IN SPOIIIC- | |
| | | | CWLA INTERGENIC REGION pir\|\|H69946 phage-related protein homolog yqbE - | |
| | | | Bacillus subtilis dbj\|BAA06938.1\| (D32216) ORF53 [Bacillus subtilis] | |
| | | | dbj\|BAA12400.1\| (D84432) YqbE [Bacillus subtilis] | |
| SEQ ID N^{o} 545 | LI-1216.1 | 51 | pir\|\|D69900 conserved hypothetical protein yobV - Bacillus subtilis | Length = 313 |
| | | | gb\|AAB84472.1\| (AF027868) transcription regulator [Bacillus subtilis] | |
| | | | emb\|CAB13802.1\| (Z99114) similar to hypothetical proteins [Bacillus subtilis] | |
| SEQ ID N^{o} 546 | LI-6135.1 | 97 | emb\|CAB53839.1\| (AJ242593) gp49 [Bacteriophage A118] | Length = 310 |
| SEQ ID N^{o} 547 | LI-6037.1 | 57 | pir\|\|T13262 integrase - Lactococcus lactis phage BK5-T gb\|AAA98585.1\| | Length = 374 |
| | | | (L44593) integrase [Lactococcus lactis phage BK5-T] | |
| SEQ ID N^{o} 548 | LI-2934.1 | 39 | emb\|CAA61519.1\| (X89234) phagelysin [Listeria innocua] | Length = 287 |
| SEQ ID N^{o} 549 | LI-4066.1 | 42 | emb\|CAA61519.1\| (X89234) phagelysin [Listeria innocua] | Length = 287 |
| SEQ ID N^{o} 550 | LI-1087.1 | 55 | pir\|\|T13262 integrase - Lactococcus lactis phage BK5-T gb\|AAA98585.1\| | Length = 374 |
| | | | (L44593) integrase [Lactococcus lactis phage BK5-T] | |
| SEQ ID N^{o} 551 | LI-6138.1 | 94 | emb\|CAB53837.1\| (AJ242593) gp47 [Bacteriophage A118] | Length = 319 |
| SEQ ID N^{o} 552 | LI-2142.1 | 47 | emb\|CAA66252.1\| (X97651) abortive phage resistance mechanism [Lactococcus | Length = 346 |
| | | | lactis] | |
| SEQ ID N^{o} 553 | LI-3995.1 | 54 | pir\|\|T13262 integrase - Lactococcus lactis phage BK5-T gb\|AAA98585.1\| | Length = 374 |
| | | | (L44593) integrase [Lactococcus lactis phage BK5-T] | |
| SEQ ID N^{o} 554 | LI-6130.1 | 53 | pir\|\|T13262 integrase - Lactococcus lactis phage BK5-T gb\|AAA98585.1\| | Length = 374 |
| | | | (L44593) integrase [Lactococcus lactis phage BK5-T] | |
| SEQ ID N^{o} 555 | LI-5313.1 | 41 | gb\|AAD46982.1\| (AF070520) unknown [Sinorhizobium meliloti] | Length = 332 |
| SEQ ID N^{o} 556 | LI-6021.1 | | No Hits found | |
| SEQ ID N^{o} 557 | LI-5319.1 | 19 | sp\|Q00753\|MSMR_STRMU MSM OPERON REGULATORY PROTEIN | Length = 278 |
| | | | gb\|AAA26932.1\| (M77351) regulatory protein [Streptococcus mutans] | |
| SEQ ID N^{o} 558 | LI-5568.1 | 69 | sp\|P45950\|YQBQ_BACSU HYPOTHETICAL 37.0 KD PROTEIN IN SPOIIIC- | |
| | | | CWLA INTERGENIC REGION pir\|\|D69948 phage-related protein homolog yqbQ - | |
| | | | Bacillus subtilis dbj\|BAA06949.1\| (D32216) ORF86 [Bacillus subtilis] | |
| | | | dbj\|BAA12413.1\| (D84432) YqbQ [Bacillus subtilis] | |
| SEQ ID N^{o} 559 | LI-2785.1 | 59 | pir\|\|S78538 site-specific recombinase tnpX - Clostridium perfringens transposon | Length = 707 |
| | | | Tn4451 gb\|AAB51419.1\| (U15027) TnpX [Clostridium perfringens] | |
| SEQ ID N^{o} 560 | LI-4060.1 | 33 | emb\|CAB53806.1\| (AJ242593) gp20 [Bacteriophage A118] | Length = 357 |
| SEQ ID N^{o} 561 | LI-14.1 | 71 | sp\|O34755\|YKOT_BACSU HYPOTHETICAL 38.5 KDA PROTEIN IN TNRA- | |
| | | | SSPD INTERGENIC REGION pir\|\|F69860 dolichol phosphate mannose | |
| | | | synthase homolog ykoT - Bacillus subtilis emb\|CAB13196.1\| (Z99110) | |
| | | | similar to dolichol phosphate mannose synthase [Bacill | |
| SEQ ID N^{o} 562 | LI-4122.1 | | No Hits found | |
| SEQ ID N^{o} 563 | LI-4955.1 | 43 | gb\|AAB67968.1\| (U77367) internalin [Listeria monocytogenes] | Length = 821 |
| SEQ ID N^{o} 564 | LI-4077.1 | 70 | pir\|\|A24455 repB protein - Bacillus sp. plasmids emb\|CAA33714.1\| (X15670) | |
| | | | repB protein (AA 1-334) [Bacillus sp.] gb\|AAA88362.1\| (M19465) alpha protein | |
| | | | [Plasmid pUB110] gb\|AAA84919.1\| (U32369) ORF alpha; RepU is encoded | |
| | | | within ORF alpha [Plasmid | |
| SEQ ID N^{o} 565 | LI-4116.1 | 67 | gb\|AAB01067.1\| (U23813) transposase [Lactococcus lactis] | Length = 385 |
| SEQ ID N^{o} 566 | LI-6051.1 | 54 | pir\|\|T13217 hypothetical protein R372 - Lactobacillus phage phi-gle | Length = 372 |
| | | | emb\|CAA66746.1\| (X98106) Rorf372 [Bacteriophage phig1e] | |
| SEQ ID N^{o} 567 | LI-3329.1 | 52 | emb\|CAB53805.1\| (AJ242593) gp19 [Bacteriophage A118] | Length = 342 |
| SEQ ID N^{o} 568 | LI-9.1 | | No Hits found | |
| SEQ ID N^{o} 569 | LI-6050.1 | 47 | emb\|CAB53805.1\| (AJ242593) gp19 [Bacteriophage A118] | Length = 342 |
| SEQ ID N^{o} 570 | LI-6078.1 | 37 | emb\|CAB53790.1\| (AJ242593) gp4 [Bacteriophage A118] | Length = 379 |
| SEQ ID N^{o} 571 | LI-1308.1 | 26 | sp\|P19934\|TOLA_ECOLI TOLA PROTEIN pir\|\|JV0057 toIA protein - Escherichia | |
| | | | coli gb\|AAA24683.1\| (M28232) toIA [Escherichia coli] dbj\|BAA35405.1\| | |
| | | | (D90713) TolA protein. [Escherichia coli] gb\|AAC73833.1\| (AE000177) | |
| | | | membrane spanning protein, required for o | |
| SEQ ID N^{o} 572 | LI-5609.1 | 23 | pir\|\|C71907 probable type II DNA modification enzyme (methyltransferase) - | |
| | | | Helicobacter pylori (strain J99) gb\|AAD06206.1\| (AE001495) putative TYPE II | |
| | | | DNA MODIFICATION ENZYME (METHYLTRANSFERASE) [Helicobacter | |
| | | | pylori J99] L | |
| SEQ ID N^{o} 573 | LI-6120.1 | 83 | gb\|AAD51846.1\|AF178758_2 (AF178758) ArsB [Sinorhizobium sp. As4] | Length = 351 |
| SEQ ID N^{o} 574 | LI-6185.1 | 50 | pir\|\|T00175 hypothetical protein 41 - Staphylococcus aureus phage phi PVL | Length = 332 |
| | | | dbj\|BAA31915.1\| (AB009866) orf 41 [bacteriophage phi PVL] | |
| SEQ ID N^{o} 575 | LI-6046.1 | 56 | emb\|CAB53806.1\| (AJ242593) gp20 [Bacteriophage A118] | Length = 357 |
| SEQ ID N^{o} 576 | LI-6122.1 | 76 | emb\|CAB85311.1\| (AL162758) putative integral membrane efflux protein | Length = 350 |
| | | | [Neisseria meningitidis] | |
| SEQ ID N^{o} 577 | LI-3326.1 | 55 | emb\|CAB53806.1\| (AJ242593) gp20 [Bacteriophage A118] | Length = 357 |
| SEQ ID N^{o} 578 | LI-1191.1 | 35 | emb\|CAB39003.1\| (AL034558) predicted using hexExon; MAL3P2.16 | Length = 1213″ |
| | | | (PF0235w), Hypothetical protein, len: 1214 aa [Plasmodium | |
| | | | falciparum] | |
| SEQ ID N^{o} 579 | LI-3160.1 | 61 | pir\|\|H69855 chloromuconate cycloisomerase homolog ykfB - Bacillus subtilis | Length = 366 |
| | | | emb\|CAA05578.1\| (AJ002571) YkfB [Bacillus subtilis] emb\|CAB13155.1\| | |
| | | | (Z99110) similar to chloromuconate cycloisomerase [Bacillus subtilis] | |
| SEQ ID N^{o} 580 | LI-5564.1 | 66 | sp\|P45935\|YQBT_BACSU HYPOTHETICAL 35.0 KD PROTEIN IN SPOIIIC- | |
| | | | CWLA INTERGENIC REGION pir\|\|G69948 phage-related protein homolog yqbT - | |
| | | | Bacillus subtilis dbj\|BAA06952.1\| (D32216) ORF89 [Bacillus subtilis] | |
| | | | dbj\|BAA12416.1\| (D84432) YqbT [Bacillus subtilis] | |
| SEQ ID N^{o} 581 | LI-1601.1 | 48 | gb\|AAB67970.1\| (U77368) inID [Listeria monocytogenes] | Length = 567 |
| SEQ ID N^{o} 582 | LI-5593.1 | 63 | sp\|P45920\|YQBD_BACSU HYPOTHETICAL 36.2 KD PROTEIN IN SPOIIIC- | |
| | | | CWLA INTERGENIC REGION pir\|\|G69946 phage-related protein homolog yqbD - | |
| | | | Bacillus subtilis dbj\|BAA06937.1\| (D32216) ORF52 [Bacillus subtilis] | |
| | | | dbj\|BAA12399.1\| (D84432) YqbD [Bacillus subtilis] | |
| SEQ ID N^{o} 583 | LI-2944.1 | 43 | gb\|AAF84513.1\|AE003994_12 (AE003994) hypothetical protein [Xylella | Length = 387 |
| | | | fastidiosa] | |
| SEQ ID N^{o} 584 | LI-2978.1 | 34 | gb\|AAF84384.1\|AE003986_14 (AE003986) hypothetical protein [Xylella | Length = 397 |
| | | | fastidiosa] gb\|AAF84489.1\|AE003993_8 (AE003993) hypothetical protein | |
| | | | [Xylella fastidiosa] | |
| SEQ ID N^{o} 585 | LI-455.1 | 34 | pir\|\|A71237 hypothetical protein PH0155 - Pyrococcus horikoshii | Length = 317 |
| | | | dbj\|BAA29224.1\| (AP000001) 317aa long hypothetical protein [Pyrococcus | |
| | | | horikoshii] | |
| SEQ ID N^{o} 586 | LI-6111.1 | 35 | gb\|AAD20952.1\| (AF060119) methyltransferase [Pasteurella haemolytica] | Length = 706 |
| SEQ ID N^{o} 587 | LI-5933.1 | 38 | emb\|CAB96616.1\| (AJ400629) integrase [Streptococcus pneumoniae | Length = 375 |
| | | | bacteriophage MM1] | |
| SEQ ID N^{o} 588 | LI-4502.2 | | | |
| SEQ ID N^{o} 589 | LI-5275.1 | 32 | pir\|\|B69981 N-acetylmuramoyl-L-alanine amidase homolog yrvJ - Bacillus subtilis | Length = 518 |
| | | | emb\|CAB14717.1\| (Z99118) similar to N-acetylmuramoyl-L-alanine amidase | |
| | | | [Bacillus subtilis] | |
| SEQ ID N^{o} 590 | LI-4111.1 | 55 | emb\|CAA51756.1\| (X73329) Na/H antiporter homolog [Lactococcus lactis] | Length = 379 |
| SEQ ID N^{o} 591 | LI-4183.1 | 87 | gb\|AAB52513.1\| (U44843) replication protein [Lactococcus lactis] | Length = 383 |
| SEQ ID N^{o} 592 | LI-2.2 | | | |
| SEQ ID N^{o} 593 | LI-3985.1 | 40 | pir\|\|T13182 integrase - Lactobacillus phage phi-gle emb\|CAA66758.1\| (X98106) | Length = 391 |
| | | | integrase [Bacteriophage phig1e] emb\|CAA62092.1\| (X90510) integrase | |
| | | | [Bacteriophage phig1e] | |
| SEQ ID N^{o} 594 | LI-4486.1 | | No Hits found | |
| SEQ ID N^{o} 595 | LI-1342.1 | 61 | pir\|\|S76946 hypothetical protein - Synechocystis sp. (strain PCC 6803) | Length = 407 |
| | | | dbj\|BAA18858.1\| (D90917) hypothetical protein [Synechocystis sp.] | |
| SEQ ID N^{o} 596 | LI-1348.1 | 26 | dbj\|BAA34922.1\| (AB012764) Chitinase A [Clostridium paraputrificum] | Length = 832 |
| SEQ ID N^{o} 597 | LI-390.1 | | No Hits found | |
| SEQ ID N^{o} 598 | LI-4039.1 | 59 | emb\|CAB63685.1\| (AJ251790) hypothetical protein [Lactobacillus casei | Length = 400 |
| | | | bacteriophage A2] | |
| SEQ ID N^{o} 599 | LI-1088.1 | 32 | gb\|AAF17614.1\|AF207855_3 (AF207855) specificity subunit LIa33I [Lactococcus | Length = 414 |
| | | | lactis] | |
| SEQ ID N^{o} 600 | LI-3255.1 | 84 | sp\|P44099\|YA38_HAEIN HYPOTHETICAL PROTEIN HI1038 pir\|\|I64018 | Length = 400 |
| | | | hypothetical protein HI1038 - Haemophilus influenzae (strain Rd KW20) | |
| | | | gb\|AAC22698.1\| (U32784) conserved hypothetical protein [Haemophilus | |
| | | | influenzae Rd] | |
| SEQ ID N^{o} 601 | LI-4036.1 | | No Hits found | |
| SEQ ID N^{o} 602 | LI-1086.1 | 35 | pir\|\|T30324 type I site-specific deoxyribonuclease (EC 3.1.21.3) LIdl chain | Length = 405 |
| | | | hsdS - Lactococcus lactis plasmid pIL2614 gb\|AAC15898.1\| (U90222) type IC | |
| | | | specificity subunit [Lactococcus lactis] | |
| SEQ ID N^{o} 603 | LI-4103.1 | 41 | gb\|AAC23674.1\| (AF064765) putative transposase [Lactococcus lactis] | Length = 216 |
| SEQ ID N^{o} 604 | LI-4112.1 | 79 | sp\|O52191\|ENO_STRTR ENOLASE (2-PHOSPHOGLYCERATE | Length = 422 |
| | | | DEHYDRATASE) (2-PHOSPHO-D-GLYCERATE HYDRO-LYASE) | |
| | | | gb\|AAC64907.1\| (AF027167) enolase [Streptococcus thermophilus] | |
| SEQ ID N^{o} 605 | LI-1186.1 | | No Hits found | |
| SEQ ID N^{o} 606 | LI-4508.1 | 41 | pir\|\|A69774 integrase homolog ydcL - Bacillus subtilis dbj\|BAA19318.1\| | |
| | | | (AB001488) PROBABLE INTEGRASE. [Bacillus subtilis] emb\|CAB12287.1\| | Length = 368 |
| | | | (Z99106) similar to integrase [Bacillus subtilis] | |
| SEQ ID N^{o} 607 | LI-4015.1 | 64 | emb\|CAB63670.1\| (AJ251789) hypothetical protein [Lactobacillus casei | Length = 455 |
| | | | bacteriophage A2] | |
| SEQ ID N^{o} 608 | LI-589.1 | 38 | pir\|\|T28677 rhoptry protein - Plasmodium yoelii gb\|AAA21304.1\| (L27838) | Length = 2269 |
| | | | rhoptry protein [Plasmodium yoelii] | |
| SEQ ID N^{o} 609 | LI-391.1 | 31 | sp\|Q58207\|Y797_METJA HYPOTHETICAL PROTEIN MJ0797 pir\|\|E64399 | Length = 367 |
| | | | hypothetical protein MJ0797 - Methanococcus jannaschii gb\|AAB98792.1\| | |
| | | | (U67524) hypothetical protein [Methanococcus jannaschii] | |
| SEQ ID N^{o} 610 | LI-4715.1 | 41 | ref\|NP_013898.1\|Ymr173w-ap pir\|\|S69870 hypothetical protein YMR173w-a - | Length = 394 |
| | | | yeast (Saccharomyces cerevisiae) | |
| SEQ ID N^{o} 611 | LI-5638.1 | 51 | pir\|\|H70216 PTS system, cellobiose-specific IIC component (celB) homolog - | Length |
| | | | Lyme disease spirochete plasmid B/cp26 gb\|AAC66324.1\| (AE000792) | |
| | | | PTS system, cellobiose-specific IIC component (celB) [Borrelia | |
| | | | burgdorferi] | |
| SEQ ID N^{o} 612 | LI-5645.1 | 65 | sp\|O06901\|MALH_FUSMR MALTOSE-6′-PHOSPHATE GLUCOSIDASE (6- | Length = 441 |
| | | | PHOSPHO-ALPHA-D-GLUCOSIDASE) gb\|AAB63015.1\| (U81185) MalH | |
| | | | [Fusobacterium mortiferum] | |
| SEQ ID N^{o} 613 | LI-4714.1 | 26 | sp\|P04929\|HRPX_PLALO HISTIDINE-RICH GLYCOPROTEIN PRECURSOR | |
| | | | pir\|\|KGZQHL histidine-rich glycoprotein precursor - Plasmodium lophurae | |
| | | | emb\|CAA25698.1\| (X01469) histidine-rich protein [Plasmodium lophurae] | |
| | | | prf\|\|1101401A protein, His rich [Plasmodium sp.] | |
| SEQ ID N^{o} 614 | LI-5602.1 | 72 | sp\|P45916\|YQAT_BACSU HYPOTHETICAL 50.9 KD PROTEIN IN SPOIIIC- | |
| | | | CWLA INTERGENIC REGION (ORF50) pir\|\|C69946 phage-related | |
| | | | terminase large subunit homolog yqaT - Bacillus subtilis dbj\|BAA06933.1\| | |
| | | | (D32216) ORF50 [Bacillus subtilis] dbj\| | |
| SEQ ID N^{o} 615 | LI-2993.1 | 17 | pir\|\|C71907 probable type II DNA modification enzyme (methyltransferase) - | |
| | | | Helicobacter pylori (strain J99) gb\|AAD06206.1\| (AE001495) putative TYPE II | |
| | | | DNA MODIFICATION ENZYME (METHYLTRANSFERASE) [Helicobacter | |
| | | | pylori J99] L | |
| SEQ ID N^{o} 616 | LI-6084.1 | | No Hits found | |
| SEQ ID N^{o} 617 | LI-4092.1 | 46 | gb\|AAF13688.1\|AF188935_86 (AF188935) pXO2-84 [Bacillus anthracis] | Length = 490 |
| SEQ ID N^{o} 618 | LI-5579.1 | 65 | sp\|P54331\|XKDK_BACSU PHAGE-LIKE ELEMENT PBSX PROTEIN XKDK | Length = 464 |
| | | | pir\|\|C69732 PBSX prophage ORF xkdK - Bacillus subtilis emb\|CAA94066.1\| | |
| | | | (Z70177) xkdK [Bacillus subtilis] emb\|CAB13122.1\| (Z99110) PBSX prophage | |
| | | | [Bacillus subtilis] | |
| SEQ ID N^{o} 619 | LI-1526.1 | 40 | pir\|\|H72265 hypothetical protein TM1336 - Thermotoga maritima (strain MSB8) | Length = 390 |
| | | | gb\|AAD36408.1\|AE001788_3 (AE001788) permease, putative [Thermotoga | |
| | | | maritima] | |
| SEQ ID N^{o} 620 | LI-528.1 | 45 | pir\|\|C55521 virS protein - Clostridium perfringens gb\|AAA58950.1\| (U04966) | Length = 440 |
| | | | VirS [Clostridium perfringens] | |
| SEQ ID N^{o} 621 | LI-4175.1 | 60 | sp\|P37062\|NAPE_ENTFA NADH PEROXIDASE (NPXASE) pir\|\|S18332 NADH | |
| | | | peroxidase (EC 1.11.1.1) - Enterococcus faecalis pdb\|1NPX\| Nadh Peroxidase | |
| | | | (E.C.1.11.1.1) Non-Active Form With Cys 42 Oxidized To A Sulfonic Acid | |
| | | | (Cys42-So3h) pdb\|2NPX\| Nadh | |
| SEQ ID N^{o} 622 | LI-6035.1 | | No Hits found | |
| SEQ ID N^{o} 623 | LI-2455.1 | | No Hits found | |
| SEQ ID N^{o} 624 | LI-4482.1 | | No Hits found | |
| SEQ ID N^{o} 625 | LI-2982.1 | 40 | gb\|AAF84380.1\|AE003986_10 (AE003986) conserved hypothetical protein | Length = 467 |
| | | | [Xylella fastidiosa] gb\|AAF84485.1\|AE003993_4 (AE003993) conserved | |
| | | | hypothetical protein [Xylella fastidiosa] | |
| SEQ ID N^{o} 626 | LI-4147.1 | 67 | sp\|P18416\|TRA3_STAAU TRANSPOSASE FOR TRANSPOSON TN552 (ORF480) | Length = |
| | | | pir\|\|S11780 probable transposase - Staphylococcus aureus transposon | |
| | | | Tn552 emb\|CAA36949.1\| (X52734) ORF480 (pot. transposase) (AA 1-480) | |
| | | | [Staphylococcus aureus] | |
| SEQ ID N^{o} 627 | LI-2981.1 | 28 | sp\|P71385\|YE07_HAEIN HYPOTHETICAL PROTEIN HI1407 pir\|\|B64122 | Length = 447 |
| | | | hypothetical protein HI1407 - Haemophilus influenzae (strain Rd KW20) | |
| | | | gb\|AAC23048.1\| (U32820) traN-related protein [Haemophilus influenzae Rd] | |
| SEQ ID N^{o} 628 | LI-2985.1 | 45 | emb\|CAA72650.1\| (Y11901) hypothetical protein [Lactococcus lactis] | Length = 462 |
| SEQ ID N^{o} 629 | LI-3.1 | 41 | sp\|P46917\|GGAA_BACSU MINOR TEICHOIC ACIDS BIOSYNTHESIS | |
| | | | PROTEIN GGAA pir\|\|D69631 galactosamine-containing minor teichoic acid | |
| | | | biosynthesis ggaA - Bacillus subtilis gb\|AAA73512.1\| (U13979) ggaA | |
| | | | [Bacillus subtilis] emb\|CAB15586.1\| (Z99122) memb | |
| SEQ ID N^{o} 630 | LI-4218.1 | | No Hits found | |
| SEQ ID N^{o} 631 | LI-457.1 | 16 | dbj\|BAA78899.1\| (AP000342) yjcA [Plasmid R100] | Length = 436 |
| SEQ ID N^{o} 632 | LI-1614.1 | 56 | gb\|AAB67970.1\| (U77368) inlD [Listeria monocytogenes] | Length = 567 |
| SEQ ID N^{o} 633 | LI-3815.1 | 29 | pir\|\|B26696 hypothetical protein 1 (CYb-COII intergenic region) - Leishmania | Length = 443 |
| | | | tarentolae mitochondrion (fragment) gb\|AAA96601.1\| (M10126) NH2 terminus | |
| | | | uncertain [Leishmania tarentolae] | |
| SEQ ID N^{o} 634 | LI-5621.1 | 37 | gb\|AAB81298.1\| (U53825) RofA [Streptococcus pyogenes] | Length = 497 |
| SEQ ID N^{o} 635 | LI-3183.1 | | No Hits found | |
| SEQ ID N^{o} 636 | LI-4531.1 | | No Hits found | |
| SEQ ID N^{o} 637 | LI-652.1 | 54 | emb\|CAA07457.1\| (AJ007319) internalin H [Listeria monocytogenes] | Length = 548 |
| SEQ ID N^{o} 638 | LI-6081.1 | | No Hits found | |
| SEQ ID N^{o} 639 | LI-3273.1 | 24 | emb\|CAB01947.1\| (Z79692) ExpA5 [Sinorhizobium meliloti] | Length = 390 |
| SEQ ID N^{o} 640 | LI-6002.1 | 57 | pir\|\|IMBP4 site-specific recombinase for integration and excision - Bacillus | Length = 474 |
| | | | phage phi-105 dbj\|BAA36658.1\| (AB016282) site-specific recombinase for | |
| | | | integration and excision [bacteriophage phi-105] | |
| SEQ ID N^{o} 641 | LI-5600.1 | 68 | sp\|P45917\|YQBA_BACSU HYPOTHETICAL 58.5 KD PROTEIN IN SPOIIIC- | |
| | | | CWLA INTERGENIC REGION pir\|\|D69946 phage-related protein homolog yqbA - | |
| | | | Bacillus subtilis dbj\|BAA06934.1\| (D32216) ORF51 [Bacillus subtilis] | |
| | | | dbj\|BAA12396.1\| (D84432) YqbA [Bacillus subtilis] | |
| SEQ ID N^{o} 642 | LI-1091.1 | 84 | gb\|AAC38346.1\| (AF013165) HsdM [Lactococcus lactis] | Length = 515 |
| SEQ ID N^{o} 643 | LI-4543.1 | | No Hits found | |
| SEQ ID N^{o} 644 | LI-1389.1 | 25 | sp\|P11055\|MYSE_HUMAN MYOSIN HEAVY CHAIN, FAST SKELETAL | Length = 1940 |
| | | | MUSCLE, EMBRYONIC (MUSCLE EMBRYONIC MYOSIN HEAVY | |
| | | | CHAIN) (SMHCE) | |
| SEQ ID N^{o} 645 | LI-3152.1 | 63 | gb\|AAF73090.1\|AF103793_1 (AF103793) peptide binding protein OppA [Listeria | Length = 558 |
| | | | monocytogenes] | |
| SEQ ID N^{o} 646 | LI-6118.1 | 55 | pir\|\|H69299 NADH oxidase (noxA-3) homolog - Archaeoglobus fulgidus | Length = 551 |
| | | | gb\|AAB90837.1\| (AE001077) NADH oxidase (noxA-3) [Archaeoglobus fulgidus] | |
| SEQ ID N^{o} 647 | LI-4879.1 | 77 | sp\|Q59925\|FTHS_STRMU FORMATE —TETRAHYDROFOLATE LIGASE | Length = 556 |
| | | | (FORMYLTETRAHYDROFOLATE SYNTHETASE) (FHS) (FTHFS) | |
| | | | gb\|AAB49329.1\| (U39612) formyl-tetrahydrofolate synthetase [Streptococcus | |
| | | | mutans] | |
| SEQ ID N^{o} 648 | LI-2212.1 | 69 | pir\|\|H64879 probable membrane protein b1309 - Escherichia coli | Length = 568 |
| | | | gb\|AAC74391.1\| (AE000229) putative polysaccharide hydrolase [Escherichia | |
| | | | coli] | |
| SEQ ID N^{o} 649 | LI-4128.1 | 49 | emb\|CAB43191.1\| (AJ011655) replication protein Rep63A [Bacillus thuringiensis] | Lenght = 513 |
| SEQ ID N^{o} 650 | LI-4158.1 | 72 | sp\|O32327\|ATKA_CLOAB POTASSIUM-TRANSPORTING ATPASE A CHAIN | Length = 556 |
| | | | (ATP PHOSPHOHYDROLASE [POTASSIUM-TRANSPORTING] A | |
| | | | CHAIN) gb\|AAC45477.1\| (U44892) KdpA [Clostridium acetobutylicum] | |
| SEQ ID N^{o} 651 | LI-6124.1 | 74 | gb\|AAD51849.1\|AF178758_5 (AF178758) ArsA [Sinorhizobium sp. As4] | Length = 587 |
| SEQ ID N^{o} 652 | LI-5597.1 | 34 | sp\|P45918\|YQBB_BACSU HYPOTHETICAL 34.9 KD PROTEIN IN SPOIIIC- | |
| | | | CWLA INTERGENIC REGION pir\|\|E69946 hypothetical protein yqbB - Bacillus | |
| | | | subtilis dbj\|BAA06935.1\| (D32216) ORF66 [Bacillus subtilis] dbj\|BAA12397.1\| | |
| | | | (D84432) YqbB [Bacillus subtilis] emb\|CAB1 | |
| SEQ ID N^{o} 653 | LI-4033.1 | 38 | gb\|AAF27357.1\|AF198256_11 (AF198256) phage D3 terminase-like protein | Length = 555 |
| | | | [Haemophilus influenzae] | |
| SEQ ID N^{o} 654 | LI-815.1 | 57 | sp\|P25146\|INLA_LISMO INTERNALIN A PRECURSOR pir\|\|S37387 internalin A | Length = 800 |
| | | | precursor - Listeria monocytogenes | |
| SEQ ID N^{o} 655 | LI-5484.1 | 15 | emb\|CAA65738.1\| (X97014) ORF A [Listeria seeligeri] | Length = 902 |
| SEQ ID N^{o} 656 | LI-5317.1 | 45 | emb\|CAB72809.1\| (AL139074) excinuclease ABC subunit A [Campylobacter | Length = 941 |
| | | | jejuni] | |
| SEQ ID N^{o} 657 | LI-5644.1 | 45 | pir\|\|F69848 transcription antiterminator BglG family homolog yjdC - Bacillus | Length = 648 |
| | | | subtilis emb\|CAB13057.1\| (Z99110) similar to transcriptional antiterminator | |
| | | | (BglG family) [Bacillus subtilis] | |
| SEQ ID N^{o} 658 | LI-6016.1 | 27 | pir\|\|T00175 hypothetical protein 41 - Staphylococcus aureus phage phi PVL | Length = 332 |
| | | | dbj\|BAA31915.1\| (AB009866) orf 41 [bacteriophage phi PVL] | |
| SEQ ID N^{o} 659 | LI-648.1 | 14 | gi\|6677945 suppressor of clear, C. elegans, homolog of dbj\|BAA74885.1\| | Length = 582 |
| | | | (AB020669) KIAA0862 protein [Homo sapiens] | |
| SEQ ID N^{o} 660 | LI-4168.1 | 56 | pir\|\|F69869 heavy metal-transporting ATPase homolog ykvW - Bacillus subtilis | Length = 637 |
| | | | emb\|CAB13258.1\| (Z99111) similar to heavy metal-transporting ATPase [Bacillus | |
| | | | subtilis] | |
| SEQ ID N^{o} 661 | LI-1442.1 | 63 | sp\|P25146\|INLA_LISMO INTERNALIN A PRECURSOR pir\|\|S37387 internalin A | Length = 800 |
| | | | precursor - Listeria monocytogenes | |
| SEQ ID N^{o} 662 | LI-17.1 | | No Hits found | |
| SEQ ID N^{o} 663 | LI-1010.1 | 12 | emb\|CAA68916.1\| (Y07639) internalin D [Listeria ivanovii] | Length = 313 |
| SEQ ID N^{o} 664 | LI-2143.1 | 42 | sp\|P09975\|YCF2_MARPO HYPOTHETICAL 259 KD PROTEIN (ORF 2136) | Length = 2136 |
| | | | pir\|\|A05037 hypothetical protein 2136 - liverwort (Marchantia polymorpha) | |
| | | | chloroplast emb\|CAA28078.1\| (X04465) ORF2136 [Marchantia polymorpha] | |
| SEQ ID N^{o} 665 | LI-4157.1 | 82 | sp\|O32328\|ATKB_CLOAB POTASSIUM-TRANSPORTING ATPASE B CHAIN | Length = 685 |
| | | | (ATP PHOSPHOHYDROLASE [POTASSIUM-TRANSPORTING] B | |
| | | | CHAIN) gb\|AAC45478.1\| (U44892) KdpB [Clostridium acetobutylicum] | |
| SEQ ID N^{o} 666 | LI-1021.1 | 21 | emb\|CAA07456.1\| (AJ007319) internalin G [Listeria monocytogenes] | Length = 490 |
| SEQ ID N^{o} 667 | LI-13.1 | | No Hits found | |
| SEQ ID N^{o} 668 | LI-4057.1 | 14 | emb\|CAB52532.1\| (AJ131519) hypothetical protein [Lactobacillus bacteriophage | Length = 241 |
| | | | phi adh] | |
| SEQ ID N^{o} 669 | LI-4019.1 | 65 | emb\|CAB63672.1\| (AJ251789) hypothetical protein [Lactobacillus casei | Length = 770 |
| | | | bacteriophage A2] | |
| SEQ ID N^{o} 670 | LI-4102.1 | 25 | dbj\|BAA87672.1\| (AB016260) Hypothetical gene, methylase gene homolog | Length = 1693 |
| | | | [Agrobacterium tumefaciens] | |
| SEQ ID N^{o} 671 | LI-12.1 | 53 | pir\|\|S49240 hypothetical protein 3 (capsulation locus) - Haemophilus influenzae | Length = 789 |
| | | | (strain RM107) emb\|CAA85752.1\| (Z37516) orf3 [Haemophilus influenzae] | |
| SEQ ID N^{o} 672 | LI-20.1 | 39 | gb\|AAC45605.1\| (U82488) AMI [Listeria monocytogenes] | Length = 917 |
| SEQ ID N^{o} 673 | LI-805.1 | 74 | emb\|CAA65738.1\| (X97014) ORF A [Listeria seeligeri] | Length = 902 |
| SEQ ID N^{o} 674 | LI-1188.1 | 9 | dbj\|BAA84909.1\| (AB024946) orf74 [Escherichia coli] | Length = 873 |
| SEQ ID N^{o} 675 | LI-1313.1 | 76 | pir\|\|F69681 phosphoenolpyruvate synthase pps - Bacillus subtilis | Length = 866 |
| | | | gb\|AAB84457.1\| (AF027868) PEP synthase [Bacillus subtilis] emb\|CAB13775.1\| | |
| | | | (Z99114) phosphoenolpyruvate synthase [Bacillus subtilis] | |
| SEQ ID N^{o} 676 | LI-4164.1 | 62 | sp\|P94608\|KDPD_CLOAB SENSOR PROTEIN KDPD gb\|AAB39095.1\| | Length = 900 |
| | | | (U39673) KdpD [Clostridium acetobutylicum] | |
| SEQ ID N^{o} 677 | LI-5773.1 | 27 | gb\|AAB67968.1\| (U77367) internalin [Listeria monocytogenes] | Length = 821 |
| SEQ ID N^{o} 678 | LI-1096.1 | 85 | gb\|AAC38345.1\| (AF013165) HsdR [Lactococcus lactis] | Length = 995 |
| SEQ ID N^{o} 679 | LI-4178.1 | 27 | pir\|\|D72308 conserved hypothetical protein - Thermotoga maritima (strain MSB8) | Length = 967 |
| | | | gb\|AAD36069.1\|AE001761_1 (AE001761) conserved hypothetical protein | |
| | | | [Thermotoga maritima] | |
| SEQ ID N^{o} 680 | LI-4052.1 | 35 | pir\|\|T03323 gene 116 protein - Lactococcus phage bIL170 gb\|AAC27195.1\| | Length = 916 |
| | | | (AF009630) I16 [bacteriophage bIL170] | |
| SEQ ID N^{o} 681 | LI-4232.1 | 15 | sp\|P25146\|INLA_LISMO INTERNALIN A PRECURSOR pir\|\|S37387 internalin A | Length = 800 |
| | | | precursor - Listeria monocytogenes | |
| SEQ ID N^{o} 682 | LI-5575.1 | 20 | sp\|P54334\|XKDO_BACSU PHAGE-LIKE ELEMENT PBSX PROTEIN XKDO | |
| | | | pir\|\|F69732 PBSX prophage ORF xkdO - Bacillus subtilis emb\|CAA94037.1\| | |
| | | | (Z70177) homologous to yqbO of the skin element [Bacillus subtilis] | |
| | | | emb\|CAB13125.1\| (Z99110) PBSX prophage [Bacillus subtil | |
| SEQ ID N^{o} 683 | LI-1720.1 | 18 | emb\|CAB83920.1\| (AL162753) hypothetical protein NMA0631 [Neisseria | Length = 1082 |
| | | | meningitidis] | |
| SEQ ID N^{o} 684 | LI-526.1 | 30 | gb\|AAD39085.1\|AF091393_1 (AF091393) surface protein R28 [Streptococcus | Length = 1260 |
| | | | pyogenes] | |
| SEQ ID N^{o} 685 | LI-4192.1 | 58 | emb\|CAB44655.1\| (Y18605) hypothetical protein RvD1-Rv2024c′ | Length = 1606 |
| | | | [Mycobacterium bovis BCG] | |
| SEQ ID N^{o} 686 | LI-2958.1 | 39 | pir\|\|T13216 minor capsid protein 1608 - Lactobacillus phage phi-gle | Length = 1608 |
| | | | emb\|CAA66745.1\| (X98106) minor capsid protein [Bacteriophage phig1e] | |
| SEQ ID N^{o} 687 | LI-3752.1 | 27 | pir\|\|T28679 fibrinogen-binding protein homolog - Staphylococcus aureus | Length = 1315 |
| | | | emb\|CAA06651.1\| (AJ005646) sdrD [Staphylococcus aureus] | |
| SEQ ID N^{o} 688 | LI-6059.1 | 11 | emb\|CAB63691.1\| (AJ251790) hypothetical protein [Lactobacillus casei | Length = 465 |
| | | | bacteriophage A2] | |
| SEQ ID N^{o} 689 | LI-1259.1 | 48 | sp\|Q07833\|WAPA_BACSU WALL-ASSOCIATED PROTEIN PRECURSOR | |
| | | | pir\|\|S32920 cell wall-associated protein precursor wapA - Bacillus subtilis | |
| | | | gb\|AAA22883.1\| (L05634) wall-associated protein [Bacillus subtilis] | |
| | | | dbj\|BAA06656.1\| (D31856) WapA protein [Bacillus subti | |

[0324]

| | | | Blastp result on non-redondant protein bank. | | |
|---|---|---|---|---|---|
| SEQ ID | Prot N^{o} | COMMENTS | homology/ | Comments/ | % |
| SEQ ID N^{o} 690 | LM-1002.1 | Unknown, similar to internalin protein | 23 | gi\|2347104\|gb\|AAB67969.1\|(U77368) internalin [Listeria | Length = 548 |
| | | | | monocytogenes] | |
| SEQ ID N^{o} 691 | LM-1005.1 | Unknown, similar to putative NAD(P)- | 53 | gi\|1361424\|pir\|\|S57559 strU protein - Streptomyces glaucescens | |
| | | dependent oxidoreductase | | | |
| SEQ ID N^{o} 692 | LM-1037.1 | Unknown | 15 | gi\|7459761\|pir\|\|C69520 hypothetical protein AF2163 - Archaeoglobus | |
| | | | | fulgidus | |
| SEQ ID N^{o} 693 | LM-1043.1 | Unknown, similar to efflux proteins | 52 | gi\|7474437\|pir\|\|B70065 antibiotic resistance protein homolog ywoG - Bacillus subtilis | |
| SEQ ID N^{o} 694 | LM-1050.1 | Unknown, LPXTG protein withh LRR repeats | 12 | gi\|5059350\|gb\|AAD38982.1\|AF153770_1 (AF153770) immunoreactive 47 kDa | Length = 428 |
| | | | | antigen PG97 [Porphyromonas gingivalis] | |
| SEQ ID N^{o} 695 | LM-1067.2 | Unknown, hypothetical secreted protein | | No Hits found | |
| SEQ ID N^{o} 696 | LM-1074.1 | internalin | 98 | gi\|2347102\|gb\|AAB67968.1\|(U77367) internalin [Listeria | Length = 821 |
| | | | | monocytogenes] | |
| SEQ ID N^{o} 697 | LM-1112.2 | Unknown, similar to B. subtilis transcription | 61 | gi\|1170575\|sp\|P46337\|IOLR_BACSU DNA-BINDING PROTEIN IOLR | |
| | | repressor of myo-inositol catabolism operon | | | |
| | | lolR | | | |
| SEQ ID N^{o} 698 | LM-1114.1 | Unknown | | No Hits found | |
| SEQ ID N^{o} 699 | LM-1115.3 | Unknown | | No Hits found | |
| SEQ ID N^{o} 700 | LM-1123.1 | Unknown | | No Hits found | |
| SEQ ID N^{o} 701 | LM-1127.1 | Unknown | | No Hits found | |
| SEQ ID N^{o} 702 | LM-1132.1 | Unknown, similar to transcription regulator | 25 | gi\|7481541\|pir\|\|T36904 probable transcription regulator - Streptomyces | |
| | | | | coelicolor | |
| SEQ ID N^{o} 703 | LM-1153.2 | Unknown, weakly similar to a bile acid 7-alpha | | No Hits found | |
| | | dehydratase | | | |
| SEQ ID N^{o} 704 | LM-1154.1 | unknown, similar to transcription regulator | 43 | gi\|7521744\|pir\|\|A70344 transcription regulator Crp/Fnr family - Aquifex | |
| | | Crp/Fnr family | | aeolicus | |
| SEQ ID N^{o} 705 | LM-1155.1 | Unknown, weakly similar to a putative | 35 | gi\|7474715\|pir\|\|C69971 conserved hypothetical protein yraK - Bacillus | |
| | | haloacetate dehalogenase | | subtilis | |
| SEQ ID N^{o} 706 | LM-1156.1 | Unknown | | No Hits found | |
| SEQ ID N^{o} 707 | LM-1157.1 | Unknown | | No Hits found | |
| SEQ ID N^{o} 708 | LM-1158.1 | Unknown | | No Hits found | |
| SEQ ID N^{o} 709 | LM-1159.1 | unknown | | No Hits found | |
| SEQ ID N^{o} 710 | LM-1160.1 | Unknown, hypothetical | | No Hits found | |
| SEQ ID N^{o} 711 | LM-1169.1 | Unknown, similar to 6-phospho-beta- | 61 | gi\|6851034\|emb\|CAB71151.1\|(AJ250202) beta-glucosidase | Length = 486 |
| | | glucosidase | | [Lactobacillus plantarum] | |
| SEQ ID N^{o} 712 | LM-1171.1 | Unknown, similar to phosphotransferase | 63 | gi\|6851033\|emb\|CAB71150.1\|(AJ250202) permease [Lactobacillus | Length = 577 |
| | | system (PTS) beta-glucoside-specific enzyme | | plantarum] | |
| | | IIABC component | | | |
| SEQ ID N^{o} 713 | LM-1172.1 | Unknown | | No Hits found | |
| SEQ ID N^{o} 714 | LM-1173.1 | Unknown, similar to ribose 5-phosphate | 70 | gi\|731980\|sp\|P37351\|RPIB_ECOLI RIBOSE 5-PHOSPHATE ISOMERASE B | |
| | | isomerase | | (PHOSPHORIBOISOMERASE B) | |
| SEQ ID N^{o} 715 | LM-1174.1 | Unknown, similar to Ribulose-5-Phosphate 3- | 58 | gi\|2829613\|sp\|P74061\|RPE_SYNY3 RIBULOSE-PHOSPHATE 3-EPIMERASE | |
| | | Epimerase | | (PENTOSE-5-PHOSPHATE 3-EPIMERASE) (PPE) (R5P3E) | |
| SEQ ID N^{o} 716 | LM-1175.1 | Unknown, similar to transcriptional regulator | 51 | gi\|1173387\|sp\|P43472\|SCRR_PEDPE SUCROSE OPERON REPRESSOR | |
| | | (Lacl family) | | (SCR OPERON REGULATORY PROTEIN) | |
| SEQ ID N^{o} 717 | LM-1176.1 | Unknown, similar to transcription regulator | 24 | gi\|2127359\|pir\|\|I40868 hypothetical protein 3 nanH region - Clostridium | |
| | | | | perfringens | |
| SEQ ID N^{o} 718 | LM-1228.1 | Unknown, similar to B. subtilis YxjH and YxjG | 60 | gi\|2828504\|sp\|P42319\|YXJH_BACSU HYPOTHETICAL 38.3 KD PROTEIN IN | |
| | | proteins | | PEPT-KATB INTERGENIC REGION | |
| SEQ ID N^{o} 719 | LM-1243.1 | HEXOSE PHOSPHATE TRANSPORT | 60 | gi\|136773\|sp\|P27670\|UHPT_SALTY HEXOSE PHOSPHATE TRANSPORT | |
| | | PROTEIN | | PROTEIN | |
| SEQ ID N^{o} 720 | LM-1248.1 | unknown, surface protein (LPXTG motif) | 29 | gi\|417315\|sp\|P32653\|MRP_STRSU MURAMIDASE-RELEASED PROTEIN | |
| | | | | PRECURSOR (136 KD SURFACE PROTEIN) | |
| SEQ ID N^{o} 721 | LM-1249.1 | unknown | | No Hits found | |
| SEQ ID N^{o} 722 | LM-1258.1 | unknown, similar to transposases | 57 | gi\|7474337\|pir\|\|H59102 hypothetical protein pXO1-96 - Bacillus anthracis | |
| | | | | virulence plasmid pXO1 | |
| SEQ ID N^{o} 723 | LM-1259.1 | unknown, similar to transposases | 62 | gi\|929968\|gb\|AAA74024.1\|(U30713) ORFA [Bacillus anthracis] | |
| SEQ ID N^{o} 724 | LM-1261 .1 | Unknown, similar to transporter | 52 | gi\|7514408\|pir\|\|H71283 conserved hypothetical integral membrane | |
| | | | | protein TP0771 - syphilis spirochete | |
| SEQ ID N^{o} 725 | LM-1267.1 | unknown | | No Hits found | |
| SEQ ID N^{o} 726 | LM-1306.1 | unknown | | No Hits found | |
| SEQ ID N^{o} 727 | LM-1343.2 | unknown | 39 | gi\|6322945\|ref\|NP_013018.1\|nucleolar protein that is immunologically | |
| | | | | and structurally related to rat Nopp140, a nonribosomal protein of the | |
| | | | | nucleolus and coiled bodies.; Srp40p | |
| SEQ ID N^{o} 728 | LM-1353.1 | unknown, similar to membrane and transport | 61 | gi\|7473695\|pir\|\|A75272 probable transport protein - Deinococcus | |
| | | proteins | | radiodurans (strain R1) | |
| SEQ ID N^{o} 729 | LM-1354.1 | unknown, similar to ABC transporter | 67 | gi\|7445714\|pir\|\|E69762 ABC transporter (permease) homolog yclH - | |
| | | | | Bacillus subtilis | |
| SEQ ID N^{o} 730 | LM-1357.1 | unknown, conserved hypothetical protein | 58 | gi\|7475935\|pir\|\|F69762 transporter homolog ycll - Bacillus subtilis | |
| SEQ ID N^{o} 731 | LM-1358.1 | unknown, similar to sensor protein histidine | 33 | gi\|2500765\|sp\|Q47745\|VANS_ENTFA SENSOR PROTEIN VANSB | |
| | | kinases (2 components regulatory systems) | | (VANCOMYCIN B-TYPE RESISTANCE PROTEIN VANSB) | |
| | | | | (VANCOMYCIN HISTIDINE PROTEIN KINASE) | |
| SEQ ID N^{o} 732 | LM-1359.1 | unknown, similar to transcription response | 65 | gi\|2500744\|sp\|Q47744\|VANR_ENTFA REGULATORY PROTEIN VANRB | |
| | | regulator | | | |
| SEQ ID N^{o} 733 | LM-1390.1 | unknown | | No Hits found | |
| SEQ ID N^{o} 734 | LM-1391.1 | unknown, similar to phosphotransferase | 66 | gi\|1100076\|gb\|AAC05713.1\|(L49336) PTS-dependent enzyme II | Length = 616 |
| | | system (PTS) beta-glucoside-specific enzyme | | [Clostridium longisporum] | |
| | | IIABC | | | |
| SEQ ID N^{o} 735 | LM-1392.1 | unknown, similar to glycerol kinase | 58 | gi\|6685472\|sp\|Q9X049\|GLK1_THEMA GLYCEROL KINASE 1 | |
| | | | | (ATP: GLYCEROL 3-PHOSPHOTRANSFERASE 1) (GLYCEROKINASE | |
| | | | | 1) (GK 1) | |
| SEQ ID N^{o} 736 | LM-1394.1 | unknown, similar to transketolase | 54 | gi\|2833526\|sp\|Q58092\|TKTC_METJA PUTATIVE TRANSKETOLASE C- | |
| | | | | TERMINAL SECTION (TK) | |
| SEQ ID N^{o} 737 | LM-1396.1 | unknown, similar to transketolase | 64 | gi\|2833528\|sp\|Q58094\|TKTN_METJA PUTATIVE TRANSKETOLASE N- | |
| | | | | TERMINAL SECTION (TK) | |
| SEQ ID N^{o} 738 | LM-1398.3 | unknown, similar to hypothetical proteins | 42 | gi\|7462474\|pir\|\|B72314 hypothetical protein - Thermotoga maritima | |
| | | | | (strain MSB8) | |
| SEQ ID N^{o} 739 | LM-1438.1 | Unknwon | 89 | gi\|466144\|sp\|P33383\|YORX_LISMO HYPOTHETICAL 12.2 KD PROTEIN IN | |
| | | | | PLCB-LDH INTERGENIC REGION PRECURSOR (ORFX) | |
| SEQ ID N^{o} 740 | LM-1439.1 | phospholipase C | 95 | gi\|464374\|sp\|P33378\|PHLC_LISMO PHOSPHOLIPASE C PRECURSOR (PLC) | |
| | | | | (PHOSPHATIDYLCHOLINE CHOLINEPHOSPHOHYDROLASE) | |
| | | | | (LECITHINASE) | |
| SEQ ID N^{o} 741 | LM-1440.1 | | | No Hits found | |
| SEQ ID N^{o} 742 | LM-1441.1 | | 16 | gi\|6649606\|gb\|AAF21477.1\|U91654_1 (U91654) merozoite surface | Length = 233 |
| | | | | antigen 2 [Plasmodium falciparum] | |
| SEQ ID N^{o} 743 | LM-1442.1 | actin-assembly inducing protein precursor | 99 | gi\|461463\|sp\|P33379\|ACTA_LISMO ACTIN-ASSEMBLY INDUCING PROTEIN | |
| | | | | PRECURSOR | |
| SEQ ID N^{o} 744 | LM-1444.1 | Zinc metalloproteinase precursor | 98 | gi\|130985\|sp\|P23224\|PRO1_LISMO ZINC METALLOPROTEINASE | |
| | | | | PRECURSOR | |
| SEQ ID N^{o} 745 | LM-1445.1 | listeriolysin O precursor | 98 | gi\|887028\|gb\|AAA69528.1\|(U25446) listeriolysin O [Listeria | |
| | | | | monocytogenes] | |
| SEQ ID N^{o} 746 | LM-1446.1 | phosphatidylinositol-specific phospholipase c | 97 | gi\|464403\|sp\|P34024\|PLC_LISMO 1-PHOSPHATIDYLINOSITOL | |
| | | | | PHOSPHODIESTERASE PRECURSOR (PHOSPHATIDYLINOSITOL- | |
| | | | | SPECIFIC PHOSPHOLIPASE C) (PI-PLC) | |
| SEQ ID N^{o} 747 | LM-1447.1 | listeriolysin positive regulatory protein | 99 | gi\|464460\|sp\|P22262\|PRFA_LISMO LISTERIOLYSIN REGULATORY | |
| | | | | PROTEIN | |
| SEQ ID N^{o} 748 | LM-1518.1 | Unknown, similar to transcription antiterminator | 42 | gi\|7475883\|pir\|\|F69848 transcription antiterminator BgIG family homolog | |
| | | BgIG family | | yjdC - Bacillus subtilis | |
| SEQ ID N^{o} 749 | LM-1519.1 | Unknown, similar to PTS system, fructose- | 51 | gi\|7450499\|pir\|\|H69626 PTS fructose-specific enzyme IIBC component | |
| | | specific IIA component | | fruA - Bacillus subtilis | |
| SEQ ID N^{o} 750 | LM-1520.1 | Unknown, similar to PTS system, fructose- | 69 | gi\|418517\|sp\|P32672\|PTWC_ECOLI PTS SYSTEM, FRUCTOSE-LIKE-2 IIC | |
| | | specific IIC component | | COMPONENT (PHOSPHOTRANSFERASE ENZYME II, C COMPONENT) | |
| SEQ ID N^{o} 751 | LM-1521.1 | Unknown, similar to PTS system, fructose- | 72 | gi\|418518\|sp\|P32673\|PTWB_ECOLI PTS SYSTEM, FRUCTOSE-LIKE-2 IIB | |
| | | specific IIB component | | COMPONENT 1 (PHOSPHOTRANSFERASE ENZYME II, B COMPONENT) | |
| SEQ ID N^{o} 752 | LM-1523.1 | Unknown, similar to an E. coli putative | 36 | gi\|2507030\|sp\|P37191\|GATZ_ECOLI PUTATIVE TAGATOSE δ-PHOSPHATE | |
| | | tagatose 6-phosphate kinase | | KINASE GATZ | |
| SEQ ID N^{o} 753 | LM-1528.1 | Unknown | | No Hits found | |
| SEQ ID N^{o} 754 | LM-1538.1 | unknown | | No Hits found | |
| SEQ ID N^{o} 755 | LM-1547.1 | Internalin B | 98 | gi\|98684\|pir\|\|C39930 hypothetical protein (internalin region) - Listeria | Length = 630 |
| | | | | monocytogenes | |
| SEQ ID N^{o} 756 | LM-1549.1 | internalin A | 95 | gi\|3123226\|sp\|P25146\|INLA_LISMO INTERNALIN A PRECURSOR | |
| SEQ ID N^{o} 757 | LM-156.1 | unknown BEST-BLASTP = | | No Hits found | |
| SEQ ID N^{o} 758 | LM-1571.1 | Unknown, conserved hypothetical protein | 59 | gi\|7388460\|sp\|P75809\|YBJI_ECOLI HYPOTHETICAL 30.2 KDA PROTEIN IN | Length = 271 |
| | | | | CMR-GRXA INTERGENIC REGION | |
| SEQ ID N^{o} 759 | LM-1572.1 | Unknown, similar to unknown protein | 48 | gi\|7482419\|pir\|\|F69065 hypothetical protein MTH1490 - | |
| | | | | Methanobacterium thermoautotrophicum (strain Delta H) | |
| SEQ ID N^{o} 760 | LM-1586.1 | unknown, similar to B. subtilis YkcC protein | 82 | gi\|3123150\|sp\|O34319\|YKCC_BACSU HYPOTHETICAL 37.4 KDA PROTEIN | |
| | | | | IN SPOIISA-HTRA INTERGENIC REGION | |
| SEQ ID N^{o} 761 | LM-1624.2 | Unknown | 19 | gi\|4959401\|gb\|AAD34335.1\|AF115391_4 (AF115391) LaaC [Lactobacillus | Length = 81 |
| | | | | sakei] | |
| SEQ ID N^{o} 762 | LM-1625.2 | Unknown | | No Hits found | |
| SEQ ID N^{o} 763 | LM-1627.1 | Unknown | | No Hits found | |
| SEQ ID N^{o} 764 | LM-1631.1 | Unknown, conserved hypothetical protein | 48 | gi\|2851530\|sp\|P32399\|YHGE_BACSU HYPOTHETICAL 84.1 KD PROTEIN IN | |
| | | | | HEMY-GLTT INTERGENIC REGION (ORFB) | |
| SEQ ID N^{o} 765 | LM-1632.1 | Unknown, similar to transcription regulator | 40 | gi\|6470204\|gb\|AAF13658.1\|AF188935_56 (AF188935) pXO2-53 [Bacillus | Length = 482 |
| | | | | anthracis] | |
| SEQ ID N^{o} 766 | LM-1634.1 | Unknown, similar to penicillin acylase | 61 | gi\|1731309\|sp\|P54948\|YXEI_BACSU HYPOTHETICAL 37.2 KD PROTEIN IN IDH-DEOR | |
| | | | | INTERGENIC REGION | |
| SEQ ID N^{o} 767 | LM-1655.1 | Unknown, similar to transcription regulator | 23 | gi\|482361\|pir\|\|A42730 trans-acting positive regulator Mry - Streptococcus | Length = 530 |
| | | (VirR from Streptococcus pyogenes) | | pyogenes (type M6, strain D471) | |
| SEQ ID N^{o} 768 | LM-1656.1 | Unknown, putative membrane associated | 19 | gi\|6731239\|gb\|AAF27178.1\|AF072716_1 (AF072716) membrane associated | Length = 445 |
| | | lipoprotein | | lipoprotein precursor [Mycoplasma mycoides mycoides SC] | |
| SEQ ID N^{o} 769 | LM-1658.1 | Unknown | | No Hits found | |
| SEQ ID N^{o} 770 | LM-1659.3 | Unknown | | No Hits found | |
| SEQ ID N^{o} 771 | LM-1660.3 | Unknown | | No Hits found | |
| SEQ ID N^{o} 772 | LM-1713.1 | Unknown, similar to transcriptional regulator | 44 | gi\|2996626\|gb\|AAC46441.1\|(AF009224) LysR-type transcriptional | Length = 304 |
| | | (LysR family) | | activator [Acinetobacter sp. ADP1] | |
| SEQ ID N^{o} 773 | LM-1714.1 | Unknown, similar to acylase | 43 | gi\|7476683\|pir\|\|E70610 hypothetical protein Rv1215c - Mycobacterium | |
| | | | | tuberculosis (strain H37RV) | |
| SEQ ID N^{o} 774 | LM-1718.2 | Unknown, similar to sugar transferase | 22 | gi\|4580634\|gb\|AAD24457.1\|AF118389_14 (AF118389) Cps2K | Length = 276 |
| | | | | [Streptococcus suis] | |
| SEQ ID N^{o} 775 | LM-1760.1 | Unknown, similar to unknown proteins | 26 | gi\|7322701\|gb\|AAF59460.1\|(AC024760) contains similarity to TR: Q10466 | Length = 6677 |
| | | | | [Caenorhabditis elegans] | |
| SEQ ID N^{o} 776 | LM-1776.3 | Unknown | 51 | gi\|7475903\|pir\|\|C69931 transcription regulator homolog yozG - Bacillus | |
| | | | | subtilis | |
| SEQ ID N^{o} 777 | LM-1778.1 | Unknown, putative peptidoglycan bound | 24 | gi\|5327234\|emb\|CAB46338.1\|(AJ133114) R5 protein [Streptococcus | Length = 979 |
| | | protein (LPXTG motif) | | agalactiae] | |
| SEQ ID N^{o} 778 | LM-18.1 | Unknwon, similar to hypothetical PTS enzyme | 40 | gi\|732028\|sp\|P39302\|PTXB_ECOLI UNKNOWN PENTITOL | |
| | | IIB component | | PHOSPHOTRANSFERASE ENZYME II, B COMPONENT | |
| SEQ ID N^{o} 779 | LM-1814.1 | Unknown, similar to putative peptidoglycan | 87 | gi\|1730252\|sp\|P54482\|GCPE_BACSU GCPE PROTEIN HOMOLOG | |
| | | acetylation protein | | | |
| SEQ ID N^{o} 780 | LM-1827.1 | Unknown, similar to E. coli LytB protein | 75 | gi\|1731004\|sp\|P54473\|YQFP_BACSU LYTB PROTEIN HOMOLOG | |
| SEQ ID N^{o} 781 | LM-1838.1 | internalin E | 97 | gi\|3980136\|emb\|CAA07458.1\|(AJ007319) internalin E [Listeria | Length = 499 |
| | | | | monocytogenes] | |
| SEQ ID N^{o} 782 | LM-1840.1 | internalin H | 95 | gi\|3980135\|emb\|CAA07457.1\|(AJ007319) internalin H [Listeria | Length = 548 |
| | | | | monocytogenes] | |
| SEQ ID N^{o} 783 | LM-1842.1 | internalin G | 98 | gi\|3980134\|emb\|CAA07456.1\|(AJ007319) internalin G [Listeria | Length = 490 |
| | | | | monocytogenes] | |
| SEQ ID N^{o} 784 | LM-1856.2 | Unknown, similar to unknown protein | 97 | gi\|6002200\|emb\|CAB56705.1\|(Y16468) hypothetical protein [Listeria | Length = 392 |
| | | | | monocytogenes] | |
| SEQ ID N^{o} 785 | LM-1858.1 | Unknown, similar to unknown protein | 47 | gi\|466146\|sp\|P33385\|YORZ_LISMO HYPOTHETICAL 16.9 KD LIPOPROTEIN | |
| | | | | IN PLCB-LDH INTERGENIC REGION PRECURSOR (ORFZ) | |
| SEQ ID N^{o} 786 | LM-1859.2 | Unknown | | No Hits found | |
| SEQ ID N^{o} 787 | LM-1861.1 | | 76 | gi\|3122592\|sp\|O32797\|PFL_LACLA FORMATE ACETYLTRANSFERASE | |
| | | | | (PYRUVATE FORMATE-LYASE) | |
| SEQ ID N^{o} 788 | LM-1972.3 | Unknown, similar to internalin | 19 | gi\|2230998\|emb\|CAA65738.1\|(X97014) ORF A [Listeria seeligeri] | Length = 902 |
| SEQ ID N^{o} 789 | LM-1974.3 | Unknown, similar to internalin | 31 | gi\|2230998\|emb\|CAA65738.1\|(X97014) ORF A [Listeria seeligeri] | Length = 902 |
| SEQ ID N^{o} 790 | LM-198.1 | diol dehydratase-reactivating factor small chain - | 58 | gi\|7467210\|pir\|\|T08598 probable diol dehydratase-reactivating factor | |
| | | Klebsiella oxytoca | | small chain - Klebsiella oxytoca | |
| SEQ ID N^{o} 791 | LM-1997.1 | unknown | | No Hits found | |
| SEQ ID N^{o} 792 | LM-2009.1 | Unknown | | No Hits found | |
| SEQ ID N^{o} 793 | LM-2037.1 | Unknwon, similar to drug-export protein | 66 | gi\|7430060\|pir\|\|F69763 multidrug resistance protein homolog ycnB - | |
| | | | | Bacillus subtilis | |
| SEQ ID N^{o} 794 | LM-2049.3 | Unknown | | No Hits found | |
| SEQ ID N^{o} 795 | LM-2050.1 | Unknown | | No Hits found | |
| SEQ ID N^{o} 796 | LM-208.1 | | | No Hits found | |
| SEQ ID N^{o} 797 | LM-2106.1 | | 95 | gi\|4336793\|gb\|AAD17954.1\|(AF105341) pyrimidine nucleoside | Length = 419 |
| | | | | phosphorylase [Listeria monocytogenes] | |
| SEQ ID N^{o} 798 | LM-2116.1 | Unknown | | No Hits found | |
| SEQ ID N^{o} 799 | LM-2130.1 | unknown | | No Hits found | |
| SEQ ID N^{o} 800 | LM-2137.2 | Unknown, similar to internalin | 19 | gi\|2230998\|emb\|CAA65738.1\|(X97014) ORF A [Listeria seeligeri] | Length = 902 |
| SEQ ID N^{o} 801 | LM-2138.1 | unknown | | No Hits found | |
| SEQ ID N^{o} 802 | LM-2141.1 | Unknown | 27 | gi\|5912390\|emb\|CAB56115.1\|(Y18096) coiled-coil protein [Sulfolobus | Length = 464 |
| | | | | solfataricus] | |
| SEQ ID N^{o} 803 | LM-2142.1 | Unknown | | No Hits found | |
| SEQ ID N^{o} 804 | LM-2145.1 | Unknown | 45 | gi\|548467\|sp\|P36496\|PEDB_PEDAC PEDIOCIN PA-1 IMMUNITY PROTEIN | |
| | | | | (PEDIOCIN ACH IMMUNITY PROTEIN) | |
| SEQ ID N^{o} 805 | LM-2161.2 | Unknwon, similar to toxin components | 17 | gi\|6730537\|pdb\|1QS2\|A Chain A, Crystal Structure Of Vip2 With Nad | Length = 401 |
| SEQ ID N^{o} 806 | LM-221.1 | unknown | 42 | gi\|7479622\|pir\|\|T35326 hypothetical protein SC5H1.10c - Streptomyces | |
| | | | | coelicolor | |
| SEQ ID N^{o} 807 | LM-2215.1 | unknown | | No Hits found | |
| SEQ ID N^{o} 808 | LM-223.1 | unknown | | No Hits found | |
| SEQ ID N^{o} 809 | LM-2244.1 | | 53 | gi\|6165970\|gb\|AAF04740.1\|(AF102169) multidrug resistance-like protein | Length = 228 |
| | | | | [Listeria monocytogenes] | |
| SEQ ID N^{o} 810 | LM-230.1 | unknown | | No Hits found | |
| SEQ ID N^{o} 811 | LM-231.1 | unknown, similar to regulatory proteins | 54 | gi\|7635981\|emb\|CAB88816.1\|(AL353832) putative MerR-family | Length = 135 |
| | | | | transcriptional regulator. [Streptomyces coelicolor A3(2)] | |
| SEQ ID N^{o} 812 | LM-232.1 | unknown, similar to B. subtilis YjcS protein | 36 | gi\|7475112\|pir\|\|C69848 hypothetical protein yjcS - Bacillus subtilis | |
| SEQ ID N^{o} 813 | LM-2323.1 | Unknown, similar to surface protein | 16 | gi\|120457\|sp\|P14738\|FNBA_STAAU FIBRONECTIN-BINDING PROTEIN | |
| | | | | PRECURSOR (FNBP) | |
| SEQ ID N^{o} 814 | LM-2334.1 | Unknown, conserved hypothetical protein | 49 | gi\|7471580\|pir\|\|E75635 conserved hypothetical protein - Deinococcus | |
| | | | | radiodurans (strain R1) | |
| SEQ ID N^{o} 815 | LM-2335.2 | Unknown, similar to unknown protein | 34 | gi\|7472782\|pir\|\|F75635 hypothetical protein - Deinococcus radiodurans | |
| | | | | (strain R1) | |
| SEQ ID N^{o} 816 | LM-2336.3 | Unknown | | No Hits found | |
| SEQ ID N^{o} 817 | LM-2358.1 | unknown, similar to efflux transporter | 44 | gi\|4467970\|emb\|CAB37973.1\|(X76640) hypothetical protein | Length = 507 |
| | | | | [Myxococcus xanthus] | |
| SEQ ID N^{o} 818 | LM-2391.1 | Unknwon | | No Hits found | |
| SEQ ID N^{o} 819 | LM-2392.1 | unknwon | | No Hits found | |
| SEQ ID N^{o} 820 | LM-2393.1 | | | No Hits found | |
| SEQ ID N^{o} 821 | LM-2394.1 | unknown | | No Hits found | |
| SEQ ID N^{o} 822 | LM-2395.1 | Unknwon | | No Hits found | |
| SEQ ID N^{o} 823 | LM-2397.1 | Unknown | | No Hits found | |
| SEQ ID N^{o} 824 | LM-2398.1 | unknown | | No Hits found | |
| SEQ ID N^{o} 825 | LM-2400.1 | unknown | | No Hits found | |
| SEQ ID N^{o} 826 | LM-2401.1 | Unknwon | | No Hits found | |
| SEQ ID N^{o} 827 | LM-2404.1 | Unknwon | | No Hits found | |
| SEQ ID N^{o} 828 | LM-241.2 | unknown | 50 | gi\|7380228\|emb\|CAB84814.1\|(AL162756) hypothetical protein [Neisseria | Length = 181 |
| | | | | meningitidis] | |
| SEQ ID N^{o} 829 | LM-2438.1 | unknwon, surface anchored protein | 21 | gi\|139687\|sp\|P11000\|WAPA_STRMU WALL-ASSOCIATED PROTEIN | |
| | | | | PRECURSOR | |
| SEQ ID N^{o} 830 | LM-2448.2 | autolysin; amidase | 99 | gi\|2653655\|gb\|AAC46384.1\|(AF035424) autolysin; amidase [Listeria | Length = 917 |
| | | | | monocytogenes] | |
| SEQ ID N^{o} 831 | LM-245.1 | unknown | | No Hits found | |
| SEQ ID N^{o} 832 | LM-246.1 | unknown | | No Hits found | |
| SEQ ID N^{o} 833 | LM-247.3 | unknown, similar to methylases | 42 | gi\|7469765\|pir\|\|S76841 hypothetical protein - Synechocystis sp. (strain | |
| | | | | PCC 6803) | |
| SEQ ID N^{o} 834 | LM-2474.1 | Unknown | 49 | gi\|7592633\|dbj\|BAA94339.1\|(AB033763) hypothetical protein | |
| | | | | [Staphylococcus aureus] | |
| SEQ ID N^{o} 835 | LM-2475.1 | Unknown, putaive secreted and Lysin rich | 26 | gi\|5921146\|dbj\|BAA84590.1\|(AB003084) RNA polymerase sigma 70 | Length = 675 |
| | | protein | | [Helicobacter pylori] | |
| SEQ ID N^{o} 836 | LM-2489.2 | Unknown, similar to phospho-N- | 74 | gi\|417313\|sp\|Q03521\|MRAY_BACSU PHOSPHO-N- | |
| | | acetylmuramoyl-pentapeptide transferase | | ACETYLMURAMOYL-PENTAPEPTIDE-TRANSFERASE (UDP- | |
| | | | | MURNAC-PENTAPEPTIDE PHOSPHOTRANSFERASE) | |
| SEQ ID N^{o} 837 | LM-2495.1 | cell-division protein FtsA | 74 | gi\|120567\|sp\|P28264\|FTSA_BACSU CELL DIVISION PROTEIN FTSA | |
| SEQ ID N^{o} 838 | LM-2503.1 | Unknown, similar to internalin protein | 35 | gi\|2347102\|gb\|AAB67968.1\|(U77367) internalin [Listeria | Length = 821 |
| | | | | monocytogenes] | |
| SEQ ID N^{o} 839 | LM-2504.1 | Unknown, putative peptidoglycan bound | 8 | gi\|7485517\|pir\|\|T41744 hypothetical protein F15J1.40 - Arabidopsis | |
| | | protein (LPXTG motif) | | thaliana | |
| SEQ ID N^{o} 840 | LM-2513.1 | | | No Hits found | |
| SEQ ID N^{o} 841 | LM-2521.1 | creatinine amidohydrolase | 46 | gi\|7479569\|pir\|\|T35153 hypothetical protein SC5A7.04c SC5A7.04c - | |
| | | | | Streptomyces coelicolor | |
| SEQ ID N^{o} 842 | LM-2522.1 | | 52 | gi\|7436634\|pir\|\|F72422 2-dehydro-3-deoxyphosphogluconate aldolase/4- | |
| | | | | hydroxy-2-oxoglutarate aldolase - Thermotoga maritima (strain MSB8) | |
| SEQ ID N^{o} 843 | LM-2523.1 | | 54 | gi\|1176259\|sp\|P45548\|PHP_ECOLI PHOSPHOTRIESTERASE HOMOLOGY | |
| | | | | PROTEIN | |
| SEQ ID N^{o} 844 | LM-2524.1 | | 55 | gi\|7480860\|pir\|\|T37066 probable integral membrane protein - | |
| | | | | Streptomyces coelicolor | |
| SEQ ID N^{o} 845 | LM-2527.1 | | 50 | gi\|2851672\|sp\|P39303\|PTXA_ECOLI UNKNOWN PENTITOL | |
| | | | | PHOSPHOTRANSFERASE ENZYME II, A COMPONENT | |
| SEQ ID N^{o} 846 | LM-2528.1 | | 50 | gi\|7443060\|pir\|\|D70044 transcription regulator GntR family homolog yvoA - | |
| | | | | Bacillus subtilis | |
| SEQ ID N^{o} 847 | LM-2597.3 | unknown, similar to MINOR TEICHOIC ACIDS | 22 | gi\|2198542\|emb\|CAA59781.1\|(X85787) ss-1,3-N- | Length = 306 |
| | | BIOSYNTHESIS PROTEIN GGAB | | acetylglucosaminyltransferase [Streptococcus pneumoniae] | |
| SEQ ID N^{o} 848 | LM-2598.3 | | 86 | gi\|3608394\|gb\|AAC35920.1\|(AF071085) putative glucose-1-phosphate | Length = 288 |
| | | | | thymidyl transferase [Enterococcus faecalis] | |
| SEQ ID N^{o} 849 | LM-2599.1 | | 74 | gi\|3608395\|gb\|AAC35921.1\|(AF071085) dTDP-4-dehydrorhamnose 3,5- | Length = 190 |
| | | | | epimerase [Enterococcus faecalis] | |
| SEQ ID N^{o} 850 | LM-2600.1 | | 75 | gi\|7437238\|pir\|\|H69105 dTDP-glucose 4,6-dehydratase - | |
| | | | | Methanobacterium thermoautotrophicum (strain Delta H) | |
| SEQ ID N^{o} 851 | LM-2601.1 | unknown, similar to DTDP-L-RHAMNOSE | 68 | gi\|3608397\|gb\|AAC35923.1\|(AF071085) putative dTDP-4-keto-L- | Length = 299 |
| | | SYNTHASE | | rhamnose reductase [Enterococcus faecalis] | |
| SEQ ID N^{o} 852 | LM-2602.1 | unknown, similar to TEICHOIC ACID | 34 | gi\|1074220\|pir\|\|S49240 hypothetical protein 3 (capsulation locus) - | |
| | | BIOSYNTHESIS PROTEIN B PRECURSOR | | Haemophilus influenzae (strain RM107) | |
| SEQ ID N^{o} 853 | LM-2606.1 | TEICHOIC ACID BIOSYNTHESIS PROTEIN B | 58 | gi\|135272\|sp\|P27621\|TAGB_BACSU TEICHOIC ACID BIOSYNTHESIS | |
| | | PRECURSOR. | | PROTEIN B PRECURSOR | |
| SEQ ID N^{o} 854 | LM-2608.1 | unknown, similar to glycosyltransferase | 46 | gi\|4580634\|gb\|AAD24457.1\|AF118389_14 (AF118389) Cps2K | Length = 276 |
| | | | | [Streptococcus suis] | |
| SEQ ID N^{o} 855 | LM-2609.1 | unknown, siumilar to glysosyltransferase | 30 | gi\|6983732\|emb\|CAB75371.1\|(AL139298) putative glycosyltransferase | Length = 1135 |
| | | | | [Streptomyces coelicolor A3(2)] | |
| SEQ ID N^{o} 856 | LM-2618.1 | integrase | 46 | gi\|7475580\|pir\|\|A69774 integrase homolog ydcL - Bacillus subtilis | |
| SEQ ID N^{o} 857 | LM-2619.1 | unknown, similar to a protein encoded by | 53 | gi\|3243181\|gb\|AAC34795.1\|(AF063010) unknown [Enterococcus faecium] | Length = 143 |
| | | Tn916 | | | |
| SEQ ID N^{o} 858 | LM-2650.2 | Similar to heme A farnesyltransferase | 67 | gi\|1841876\|dbj\|BAA11110.1\|(D70843) heme O synthetase [Bacillus | Length = 307 |
| | | | | stearothermophilus] | |
| SEQ ID N^{o} 859 | LM-2664.2 | | 73 | gi\|399058\|sp\|P31104\|AROC_BACSU CHORISMATE SYNTHASE (5- | |
| | | | | ENOLPYRUVYLSHIKIMATE-3-PHOSPHATE PHOSPHOLYASE) | |
| | | | | (VEGETATIVE PROTEIN 216) (VEG216) | |
| SEQ ID N^{o} 860 | LM-2689.1 | unknown, conserved hypothetical protein, | 60 | gi\|418459\|sp\|P32726\|YLXS_BACSU HYPOTHETICAL 17.6 KDA PROTEIN IN | |
| | | similar to B. subtilis YlxS protein | | NUSA 5′REGION (P15A) (ORF1) | |
| SEQ ID N^{o} 861 | LM-270.1 | unknown | 37 | gi\|7445062\|pir\|\|E72278 transcription regulator, RpiR family - Thermotoga | |
| | | | | maritima (strain MSB8) | |
| SEQ ID N^{o} 862 | LM-272.1 | Unknown, similar to PTS system, fructose- | 50 | gi\|1708300\|sp\|P54745\|HRSA_ECOLI HRSA PROTEIN | |
| | | specific IIABC component | | | |
| SEQ ID N^{o} 863 | LM-273.1 | Unknown, weakly similar to sugar hydrolase | 49 | gi\|2506621\|sp\|P54746\|YBGG_ECOLI HYPOTHETICAL 100.0 KDA PROTEIN IN | |
| | | | | HRSA-CYDA NTERGENIC REGION | |
| SEQ ID N^{o} 864 | LM-274.1 | Unknown, similar to Sucrose phosphorylase | 59 | gi\|7466753\|pir\|\|H64879 probable membrane protein b1309 - Escherichia | |
| | | | | coli | |
| SEQ ID N^{o} 865 | LM-275.1 | Unknown, conserved hypothetical protein | 64 | gi\|1176152\|sp\|P44507\|YHAD_HAEIN HYPOTHETICAL PROTEIN HI0091 | |
| SEQ ID N^{o} 866 | LM-2761.1 | | | No Hits found | |
| SEQ ID N^{o} 867 | LM-284.1 | unknown | | No Hits found | |
| SEQ ID N^{o} 868 | LM-2928.1 | Unknown, similar to oxidoreductase | 51 | gi\|7499000\|pir\|\|T16059 hypothetical protein F13D11.4 - Caenorhabditis | |
| | | | | elegans | |
| SEQ ID N^{o} 869 | LM-2929.1 | Unknown, similar to transcriptional regulator | 41 | gi\|7444887\|pir\|\|B69970 transcription regulator MerR family homolog yraB - | |
| | | (MerR family) | | Bacillus subtilis | |
| SEQ ID N^{o} 870 | LM-3009.3 | unknown BEST-BLASTP = | 34 | gi\|7470965\|pir\|\|T28679 fibrinogen-binding protein homolog - | |
| | | | | Staphylococcus aureus | |
| SEQ ID N^{o} 871 | LM-3010.1 | unknown, highly similar to TN916 ORF23 | 79 | gi\|532556\|gb\|AAB60010.1\|(U09422) ORF23 [Enterococcus faecalis] | |
| SEQ ID N^{o} 872 | LM-3011.1 | unknown, highly similar to TN916 ORF22 | 82 | gi\|532555\|gb\|AAB60011.1\|(U09422) ORF22 [Enterococcus faecalis] | |
| SEQ ID N^{o} 873 | LM-3012.1 | unknown, highly similar to TN916 ORF21 | 80 | gi\|532554\|gb\|AAB60012.1\|(U09422) ORF21 [Enterococcus faecalis] | |
| SEQ ID N^{o} 874 | LM-3013.1 | unknown, highly similar to TN916 ORF20 | 68 | gi\|532553\|gb\|AAB60013.1\|(U09422) ORF20 [Enterococcus faecalis] | |
| SEQ ID N^{o} 875 | LM-3014.1 | unknown, similar to B. subtilis YddA protein | 47 | gi\|7459823\|pir\|\|B69775 hypothetical protein yddA - Bacillus subtilis | |
| | | BEST-BLASTP = | | | |
| SEQ ID N^{o} 876 | LM-3016.1 | unknown, highly similar to TN916 ORF18 | 56 | gi\|532551\|gb\|AAB60015.1\|(U09422) ORF18 [Enterococcus faecalis] | |
| SEQ ID N^{o} 877 | LM-3017.1 | unknown, highly similar to TN916 ORF17 | 73 | gi\|532550\|gb\|AAB60016.1\|(U09422) ORF17 [Enterococcus faecalis] | |
| SEQ ID N^{o} 878 | LM-3018.1 | unknown, highly similar to TN916 ORF16 | 92 | gi\|532549\|gb\|AAB60017.1\|(U09422) ORF16 [Enterococcus faecalis] | |
| SEQ ID N^{o} 879 | LM-3020.1 | unknown, highly similar to TN916 ORF15 | 70 | gi\|532548\|gb\|AAB60018.1\|(U09422) ORF15 [Enterococcus faecalis] | |
| SEQ ID N^{o} 880 | LM-3022.1 | unknown, highly similar to TN916 ORF14 and | 82 | gi\|532547\|gb\|AAB60019.1\|(U09422) ORF14 [Enterococcus faecalis] | |
| | | to L. monocytogenes P60 protein | | | |
| SEQ ID N^{o} 881 | LM-3023.1 | unknown, highly similar to TN916 ORF13 | 71 | gi\|532546\|gb\|AAB60020.1\|(U09422) ORF13 [Enterococcus faecalis] | |
| SEQ ID N^{o} 882 | LM-3024.1 | CADMIUM EFFLUX SYSTEM ACCESSORY | 69 | gi\|3121831\|sp\|Q56405\|CADC_LISMO CADMIUM EFFLUX SYSTEM | |
| | | PROTEIN. | | ACCESSORY PROTEIN | |
| SEQ ID N^{o} 883 | LM-3056.1 | Unknown, similar to plsX protein involved in | 75 | gi\|6686325\|sp\|P71018\|PLSX_BACSU FATTY ACID/PHOSPHOLIPID SYNTHESIS | |
| | | fatty acid/phospholipid synthesis | | PROTEIN PLSX | |
| SEQ ID N^{o} 884 | LM-3101.1 | Unknown, similar to B. subtilis comG operon | 30 | gi\|3287181\|emb\|CAA75315.1\|(Y15043) homology to ComYD from | Length = 150 |
| | | protein 6 | | Streptcoccus gordonii, and ComGD from Bacillus subtilis [Lactococcus | |
| | | | | lactis subsp. cremoris] | |
| SEQ ID N^{o} 885 | LM-3116.2 | unknown, similar to hypothetical proteins | 63 | gi\|1730957\|sp\|P50839\|YPSB_BACSU HYPOTHETICAL 11.6 KD PROTEIN IN | |
| | | | | COTD-KDUD INTERGENIC REGION | |
| SEQ ID N^{o} 886 | LM-3169.1 | | 83 | gi\|466194\|sp\|P35163\|RESD_BACSU TRANSCRIPTIONAL REGULATORY | |
| | | | | PROTEIN RESD | |
| SEQ ID N^{o} 887 | LM-3181.2 | | 73 | gi\|1710383\|sp\|P46352\|RIPX_BACSU PROBABLE | |
| | | | | INTEGRASE/RECOMBINASE RIPX | |
| SEQ ID N^{o} 888 | LM-3244.3 | unknown, similar to carbonic anhydrase | 40 | gi\|4389447\|pdb\|1KOQ\|B Chain B, Neisseria Gonorrhoeae Carbonic | Length = 221 |
| | | | | Anhydrase | |
| SEQ ID N^{o} 889 | LM-3284.1 | Unknown, putative secreted protein | 49 | gi\|140696\|sp\|P10024\|YGl3_BACTU HYPOTHETICAL 13.4 KD PROTEIN (ORF3) | |
| SEQ ID N^{o} 890 | LM-3285.1 | Unknown, putative secreted protein | 34 | gi\|140696\|sp\|P10024\|YGI3_BACTU HYPOTHETICAL 13.4 KD PROTEIN (ORF3) | |
| SEQ ID N^{o} 891 | LM-3286.1 | Unknown, putative secreted protein | 50 | gi\|140696\|sp\|P10024\|YGI3_BACTU HYPOTHETICAL 13.4 KD PROTEIN (ORF3) | |
| SEQ ID N^{o} 892 | LM-3330.2 | Unknown, similar to oxetanocin A resistance | 70 | gi\|7474545\|pir\|\|F69784 conserved hypothetical protein ydhJ - Bacillus | |
| | | protein oxrB | | subtilis | |
| SEQ ID N^{o} 893 | LM-3331.1 | Unknown | | No Hits found | |
| SEQ ID N^{o} 894 | LM-3332.1 | Unknown | | No Hits found | |
| SEQ ID N^{o} 895 | LM-3333.1 | Unknown | | No Hits found | |
| SEQ ID N^{o} 896 | LM-3334.1 | Unknown | | No Hits found | |
| SEQ ID N^{o} 897 | LM-3335.2 | Unknown | 31 | gi\|7479713\|pir\|\|T35598 hypothetical protein SC6G9.01c - Streptomyces | |
| | | | | coelicolor (fragment) | |
| SEQ ID N^{o} 898 | LM-3336.3 | Unknown, weakly similar to site-specific DNA- | 24 | gi\|1769991\|emb\|CAA65779.1\| (X97069) site-specific DNA- | Length = 259 |
| | | methyltransferase | | methyltransferase [Bacillus stearothermophilus] | |
| SEQ ID N^{o} 899 | LM-3337.3 | Unknown | 18 | gi\|7463337\|pir\|\|G70163 hypothetical protein BB0512 - Lyme disease | |
| | | | | spirochete | |
| SEQ ID N^{o} 900 | LM-3344.1 | Unknown | 11 | gi\|7494294\|pir\|\|D71614 hypothetical protein PFB0460c - malaria parasite | |
| | | | | (Plasmodium falciparum) | |
| SEQ ID N^{o} 901 | LM-3361.2 | | 35 | gi\|1730885\|sp\|P50728\|YPBB_BACSU HYPOTHETICAL 40.7 KD PROTEIN IN FER-RECQ | |
| | | | | INTERGENIC REGION | |
| SEQ ID N^{o} 902 | LM-338.1 | Unknown, similar to lipase | 39 | gi\|7448882\|pir\|\|C69464 carboxylesterase (estA) homolog - | |
| | | | | Archaeoglobus fulgidus | |
| SEQ ID N^{o} 903 | LM-3398.1 | cysteinyl-tRNA synthetase | 76 | gi\|549024\|sp\|Q06752\|SYC_BACSU CYSTEINYL-TRNA SYNTHETASE | |
| | | | | (CYSTEINE--TRNA LIGASE) (CYSRS) | |
| SEQ ID N^{o} 904 | LM-3418.2 | unknown, peptidoglycan linked protein | 13 | gi\|2230998\|emb\|CAA65738.1\| (X97014) ORF A [Listeria seeligeri] | Length = 902 |
| | | (LPxTG) | | | |
| SEQ ID N^{o} 905 | LM-345.1 | Unknown, similar to transcription regulator | 46 | gi\|7442876\|pir\|\|F70203 xylose operon regulatory protein (xyIR-2) | |
| | | | | homolog - Lyme disease spirochete | |
| SEQ ID N^{o} 906 | LM-3463.2 | unknown | | No Hits found | |
| SEQ ID N^{o} 907 | LM-3469.2 | Unknown | | No Hits found | |
| SEQ ID N^{o} 908 | LM-3477.1 | Unknown, similar to internalin | 42 | gi\|2347102\|gb\|AAB67968.1\| (U77367) internalin [Listeria | Length = 821 |
| | | | | monocytogenes] | |
| SEQ ID N^{o} 909 | LM-3480.3 | Unknown | 54 | gi\|7475781\|pir\|\|A70002 protein kinase homolog ytvA - Bacillus subtilis | |
| SEQ ID N^{o} 910 | LM-3494.3 | unknown, similar to B. subtilis protein YkvS | 53 | gi\|7475155\|pir\|\|B69869 hypothetical protein ykvS - Bacillus subtilis | |
| SEQ ID N^{o} 911 | LM-3512.1 | Unknown, similar to conjugated bile acid | 82 | gi\|729058\|sp\|Q06115\|CBH_LACPL CHOLOYLGLYCINE HYDROLASE | |
| | | hydrolase | | (CONJUGATED BILE ACID HYDROLASE) (CBAH) (BILE SALT | |
| | | | | HYDROLASE) | |
| SEQ ID N^{o} 912 | LM-3517.2 | Unknown, similar to unknown proteins | 73 | gi\|7429544\|pir\|\|E69879 conserved hypothetical protein yloV - Bacillus | |
| | | | | subtilis | |
| SEQ ID N^{o} 913 | LM-3528.2 | Unknown, similar to heme O oxygenase | 71 | gi\|4584149\|emb\|CAB40605.1\| (AJ010111) cytochrome aa3 controlling | Length = 311 |
| | | | | protein [Bacillus cereus] | |
| SEQ ID N^{o} 914 | LM-3538.3 | unknown, similar to transcriptional regulator, | 50 | gi\|7442860\|pir\|\|D69834 transcription regulator Lacl family homolog yhjM - | |
| | | Lacl family | | Bacillus subtilis | |
| SEQ ID N^{o} 915 | LM-3562.2 | | | No Hits found | |
| SEQ ID N^{o} 916 | LM-3582.1 | Unknown, similar to transcription regulator | 43 | gi\|7521750\|pir\|\|C70487 transcription regulator TetR/AcrR family - Aquifex | |
| | | TetR/AcrR family | | aeolicus | |
| SEQ ID N^{o} 917 | LM-360.1 | unknown | | No Hits found | |
| SEQ ID N^{o} 918 | LM-3609.1 | unknown, similar to AUTOLYSIN (EC 3.5.1.28) | 24 | gi\|584748\|sp\|P37710\|ALYS_ENTFA AUTOLYSIN (N- | |
| | | (N-ACETYLMURAMOYL-L-ALANINE | | ACETYLMURAMOYL-L-ALANINE AMIDASE) | |
| | | AMIDASE) | | | |
| SEQ ID N^{o} 919 | LM-3612.1 | unknown, similar to TEICHOIC ACID | 35 | gi\|1074220\|pir\|\|S49240 hypothetical protein 3 (capsulation locus) - | |
| | | BIOSYNTHESIS PROTEIN B PRECURSOR | | Haemophilus influenzae (strain RM107) | |
| SEQ ID N^{o} 920 | LM-3614.3 | unknown, similar to B. subtilis YfhO protein | 40 | gi\|7475003\|pir\|\|G69801 hypothetical protein yfhO - Bacillus subtilis | |
| SEQ ID N^{o} 921 | LM-3676.2 | | 65 | gi\|1706797\|sp\|P49937\|FHUG_BACSU FERRICHROME TRANSPORT | |
| | | | | SYSTEM PERMEASE PROTEIN FHUG | |
| SEQ ID N^{o} 922 | LM-3681.2 | unknown | | No Hits found | |
| SEQ ID N^{o} 923 | LM-3691.2 | Unknown, putative peptdoglycan bound protein | 31 | gi\|7470965\|pir\|\|T28679 fibrinogen-binding protein homolog - | |
| | | (LPXTG motif) BEST-BLASTP = | | Staphylococcus aureus | |
| SEQ ID N^{o} 924 | LM-3700.2 | Unknwon, peptidoglycan anchored protein | 22 | gi\|7470965\|pir\|\|T28679 fibrinogen-binding protein homolog - | |
| | | | | Staphylococcus aureus | |
| SEQ ID N^{o} 925 | LM-3728.1 | unknown | | No Hits found | |
| SEQ ID N^{o} 926 | LM-3746.2 | Unknown, similar to N-acetyltransferase | 29 | gi\|7427903\|pir\|\|B70064 probable phosphinothricin N-acetyltransferase | |
| | | | | (EC 2.3.1.-) ywnH - Bacillus subtilis | |
| SEQ ID N^{o} 927 | LM-375.1 | Unknwon, similar to oxidoreductases | 68 | gi\|7447923\|pir\|\|H72307 oxidoreductase, aldo/keto reductase family - | |
| | | | | Thermotoga maritima (strain MSB8) | |
| SEQ ID N^{o} 928 | LM-3750.2 | Unknown, similar to transposase | 57 | gi\|7474337\|pir\|\|H59102 hypothetical protein pXO1-96 - Bacillus anthracis | |
| | | | | virulence plasmid pXO1 | |
| SEQ ID N^{o} 929 | LM-3754.2 | | | No Hits found | |
| SEQ ID N^{o} 930 | LM-376.1 | Unknown, similar to transcription regulator | 60 | gi\|7444887\|pir\|\|B69970 transcription regulator MerR family homolog yraB - | |
| | | (merR family) | | Bacillus subtilis | |
| SEQ ID N^{o} 931 | LM-377.1 | Unknwon | | No Hits found | |
| SEQ ID N^{o} 932 | LM-3779.3 | internalin C | 92 | gi\|1546905\|emb\|CAA65088.1\| (X95822) internalin family protein [Listeria | |
| | | | | monocytogenes] | |
| SEQ ID N^{o} 933 | LM-378.1 | Unknwon | | No Hits found | |
| SEQ ID N^{o} 934 | LM-379.1 | Unknwon | | No Hits found | |
| SEQ ID N^{o} 935 | LM-380.1 | Unknwon | | No Hits found | |
| SEQ ID N^{o} 936 | LM-3811.3 | Unknown | 20 | gi\|2128791\|pir\|\|A64465 hypothetical protein MJ1322 - Methanococcus | |
| | | | | jannaschii | |
| SEQ ID N^{o} 937 | LM-3836.1 | | | No Hits found | |
| SEQ ID N^{o} 938 | LM-3848.1 | riboflavin kinase and FAD synthase | 66 | gi\|7444638\|pir\|\|D69692 riboflavin kinase/FAD synthase ribC - Bacillus | |
| | | | | subtilis | |
| SEQ ID N^{o} 939 | LM-3853.2 | Unknown, weakly similar to transposase | 45 | gi\|7474193\|pir\|\|T09011 probable transposase TnpA - Streptococcus | |
| | | | | pyogenes (fragment) | |
| SEQ ID N^{o} 940 | LM-387.1 | Unknown | | No Hits found | |
| SEQ ID N^{o} 941 | LM-388.1 | unknown | | No Hits found | |
| SEQ ID N^{o} 942 | LM-3887.1 | unknown | | No Hits found | |
| SEQ ID N^{o} 943 | LM-389.1 | unknown | | No Hits found | |
| SEQ ID N^{o} 944 | LM-3890.1 | Unknown | 78 | gi\|6226126\|sp\|O32233\|SECG_BACSU PROBABLE PROTEIN-EXPORT | |
| | | | | MEMBRANE PROTEIN SECG | |
| SEQ ID N^{o} 945 | LM-390.3 | unknown | | No Hits found | |
| SEQ ID N^{o} 946 | LM-3905.2 | Unknown | | No Hits found | |
| SEQ ID N^{o} 947 | LM-392.3 | unknown | | No Hits found | |
| SEQ ID N^{o} 948 | LM-3929.1 | unknown | | No Hits found | |
| SEQ ID N^{o} 949 | LM-3934.1 | Unknown, similar to transposase | 62 | gi\|929968\|gb\|AAA74024.1\| (U30713) ORFA [Bacillus anthracis] | |
| SEQ ID N^{o} 950 | LM-395.2 | Unknown, similar to dinitrogenase reductase | 47 | gi\|6136600\|sp\|Q58588\|YB87_METJA HYPOTHETICAL PROTEIN MJ1187 | |
| | | ADP-ribosylation system | | | |
| SEQ ID N^{o} 951 | LM-3951.1 | Unknown | 14 | gi\|1389737\|gb\|AAB03089.1\| (U55187) arabinosidase [Butyrivibrio | Length = 789 |
| | | | | fibrisolvens] | |
| SEQ ID N^{o} 952 | LM-3953.1 | Hypothetical orf | | No Hits found | |
| SEQ ID N^{o} 953 | LM-3954.2 | Unknown | | No Hits found | |
| SEQ ID N^{o} 954 | LM-3958.1 | | 58 | gi\|5929908\|gb\|AAD56637.1\|AF174588_1 (AF174588) ComK [Listeria | Length = 190 |
| | | | | monocytogenes] | |
| SEQ ID N^{o} 955 | LM-3973.2 | LIPOPROTEIN SIGNAL PEPTIDASE (EC | 56 | gi\|400202\|sp\|P31024\|LSPA_STAAU LIPOPROTEIN SIGNAL PEPTIDASE | |
| | | 3.4.23.36) (PROLIPOPROTEIN SIGNAL | | (PROLIPOPROTEIN SIGNAL PEPTIDASE) (SIGNAL PEPTIDASE II) | |
| | | PEPTIDASE) (SIGNAL PEPTIDASE II) | | (SPASE II) | |
| | | (SPASE II). | | | |
| SEQ ID N^{o} 956 | LM-3976.4 | Unknown, similar to repressor (penicilinase | 53 | sp\|P06555\|BLAI_BACLI PENICILLINASE REPRESSOR (REGULATORY | |
| | | repressor) | | PROTEIN BLAI) (BETA-LACTAMASE REPRESSOR PROTEIN) | |
| SEQ ID N^{o} 957 | LM-3995.1 | unknown | | No Hits found | |
| SEQ ID N^{o} 958 | LM-4013.2 | unknown, similar to transcriptional regulator | 56 | gi\|1730943\|sp\|P54182\|YPOP_BACSU HYPOTHETICAL TRANSCRIPTIONAL | |
| | | (MarR family) | | REGULATOR IN UVRX-ILVA INTERGENIC REGION | |
| SEQ ID N^{o} 959 | LM-402.1 | Unknown | | No Hits found | |
| SEQ ID N^{o} 960 | LM-4040.1 | Unknown | | No Hits found | |
| SEQ ID N^{o} 961 | LM-4065.1 | | 47 | gi\|7480201\|pir\|\|T37067 hypothetical protein SCJ21.18c - Streptomyces | |
| | | | | coelicolor (fragment) | |
| SEQ ID N^{o} 962 | LM-4096.1 | Unknown | | No Hits found | |
| SEQ ID N^{o} 963 | LM-4097.1 | Unknown | | No Hits found | |
| SEQ ID N^{o} 964 | LM-4106.1 | Unknown, similar to putative transcription | 72 | gi\|7474280\|pir\|\|H59095 hypothetical protein pXO1-40 - Bacillus anthracis | |
| | | regulator | | virulence plasmid pXO1 | |
| SEQ ID N^{o} 965 | LM-4118.1 | Unknown | | No Hits found | |
| SEQ ID N^{o} 966 | LM-4119.1 | unknown | | No Hits found | |
| 5EQ ID N^{o} 967 | LM-4121.1 | unknown | | No Hits found | |
| SEQ ID N^{o} 968 | LM-4137.1 | unknown | | No Hits found | |
| SEQ ID N^{o} 969 | LM-4147.1 | unknown, highly similar to TN916 ORF8 | 61 | gi\|431129\|gb\|AAC36979.1\| (L15633) [Conjugative transposon Tn916 | |
| | | | | (from Enterococcus faecalis, DS16), 3′ end.], gene products [Transposon | |
| | | | | Tn916] | |
| SEQ ID N^{o} 970 | LM-4148.1 | unknown, highly similar to TN916 ORF19 | 89 | gi\|532552\|gb\|AAB60014.1\| (U09422) ORF19 [Enterococcus faecalis] | |
| SEQ ID N^{o} 971 | LM-4149.2 | unknown | 18 | gi\|6325248\|ref\|NP_015316.1\|YpI009cp | |
| SEQ ID N^{o} 972 | LM-4152.2 | unknown, similar to transcriptional regulator | | No Hits found | |
| SEQ ID N^{o} 973 | LM-4166.1 | Unknown, hypothetical gene | | No Hits found | |
| SEQ ID N^{o} 974 | LM-417.1 | hosphoribosylaminoimidazole carboxylase I | 84 | gi\|131626\|sp\|P12044\|PUR6_BACSU PHOSPHORIBOSYLAMINOIMIDAZOLE | |
| | | | | CARBOXYLASE CATALYTIC SUBUNIT (AIR CARBOXYLASE) (AIRC) | |
| SEQ ID N^{o} 975 | LM-4174.1 | unknown | | No Hits found | |
| SEQ ID N^{o} 976 | LM-4175.1 | unknown | 53 | gi\|7475018\|pir\|\|F69808 hypothetical protein yfkK - Bacillus subtilis | |
| SEQ ID N^{o} 977 | LM-4188.1 | | | No Hits found | |
| SEQ ID N^{o} 978 | LM-4192.1 | unknown | | No Hits found | |
| SEQ ID N^{o} 979 | LM-4193.1 | unknown | | No Hits found | |
| SEQ ID N^{o} 980 | LM-4195.1 | Unknown | | No Hits found | |
| SEQ ID N^{o} 981 | LM-4197.1 | Unknown | | No Hits found | |
| SEQ ID N^{o} 982 | LM-4200.1 | unknown | | No Hits found | |
| SEQ ID N^{o} 983 | LM-4203.1 | | 49 | gi\|7475129\|pir\|\|G69854 hypothetical protein yjzD - Bacillus subtilis | |
| SEQ ID N^{o} 984 | LM-4207.1 | unknwon | 48 | gi\|5730320\|emb\|CAB52541.1\| (AJ131519) hypothetical protein | Length = 61 |
| | | | | [Lactobacillus bacteriophage phi adh] | |
| SEQ ID N^{o} 985 | LM-4209.1 | Bacteriophage A118 gp65 protein | 69 | gi\|5823667\|emb\|CAB53855.1\| (AJ242593) gp65 [Bacteriophage A118] | Length = 54 |
| SEQ ID N^{o} 986 | LM-4211.1 | | | No Hits found | |
| SEQ ID N^{o} 987 | LM-4213.1 | Unknown | | No Hits found | |
| SEQ ID N^{o} 988 | LM-4214.1 | Unknown | | No Hits found | |
| SEQ ID N^{o} 989 | LM-4215.1 | gp44 [Bacteriophage A118] | 57 | gi\|5823646\|emb\|CAB53834.1\| (AJ242593) gp44 [Bacteriophage A118] | Length = 72 |
| SEQ ID N^{o} 990 | LM-4216.1 | Unknown, similar to transcription regulator | 53 | gi\|1176725\|sp\|P45903\|YQAF_BACSU HYPOTHETICAL TRANSCRIPTIONAL | |
| | | | | REGULATOR IN SPOIIIC-CWLA INTERGENIC REGION (ORF8) | |
| SEQ ID N^{o} 991 | LM-4226.1 | | | No Hits found | |
| SEQ ID N^{o} 992 | LM-4227.1 | Unknown, similar to repressor protein | 67 | gi\|7521352\|pir\|\|G75183 probable repressor protein PAB7155 - | |
| | | | | Pyrococcus abyssi (strain Orsay) | |
| SEQ ID N^{o} 993 | LM-4236.1 | unknown | | No Hits found | |
| SEQ ID N^{o} 994 | LM-4246.1 | Unknwon, hypothetical protein | | No Hits found | |
| SEQ ID N^{o} 995 | LM-4251.1 | Unknown, Hypothetical | | No Hits found | |
| SEQ ID N^{o} 996 | LM-4262.2 | Unknown, similar to penicillinase antirepressor | 44 | sp\|P12287\|BLAR_BACLI REGULATORY PROTEIN BLAR1 | |
| SEQ ID N^{o} 997 | LM-4267.1 | unknown, similar to regulatory proteins | 18 | gi\|2495368\|sp\|Q56070\|MARA_SALTY MULTIPLE ANTIBIOTIC RESISTANCE | |
| | | | | PROTEIN MARA | |
| SEQ ID N^{o} 998 | LM-4268.1 | unknown | | No Hits found | |
| SEQ ID N^{o} 999 | LM-4295.1 | | | No Hits found | |
| SEQ ID N^{o} 1000 | LM-4342.1 | | 46 | pir\|\|H70081 hypothetical protein yxIE - Bacillus subtilis dbj\|BAA11736.1\| | Length = 62 |
| | | | | (D83026) hypothetical [Bacillus subtilis] emb\|CAB15893.1\| (Z99123) yxIE | |
| | | | | [Bacillus subtilis] | |
| SEQ ID N^{o} 1001 | LM-4351.1 | | | No Hits found | |
| SEQ ID N^{o} 1002 | LM-48.1 | Unknown, conserved hypothetical protein | 40 | gi\|4895134\|gb\|AAD32741.1\| (AF127374) MmcQ [Streptomyces lavendulae] | Length = 123 |
| SEQ ID N^{o} 1003 | LM-49.1 | Unknown | | No Hits found | |
| SEQ ID N^{o} 1004 | LM-494.1 | Unknown, similar to transcriptional regulator | 29 | gi\|7478115\|pir\|\|H70940 probable helix-turn-helix motif at aa 18-39 - | |
| | | | | Mycobacterium tuberculosis (strain H37RV) | |
| SEQ ID N^{o} 1005 | LM-497.1 | Unknown, weakly similar to | 12 | gi\|5823630\|emb\|CAB53818.1\| (AJ242593) gp32 [Bacteriophage A118] | Length = 246 |
| | | gp32_Bacteriophage A118 protein | | | |
| SEQ ID N^{o} 1006 | LM-501.1 | | | No Hits found | |
| SEQ ID N^{o} 1007 | LM-502.1 | Unknown | | No Hits found | |
| SEQ ID N^{o} 1008 | LM-506.1 | Unknown, similar to anti-repressor | 83 | gi\|5823644\|emb\|CAB53832.1\| (AJ242593) putative anti-repressor | Length = 262 |
| | | [Bacteriophage A118] BEST-BLASTP = | | promoter [Bacteriophage A118] | |
| SEQ ID N^{o} 1009 | LM-509.1 | Unknown, similar to bacteriophage proteins | 48 | gi\|6599320\|emb\|CAB63666.1\| (AJ251789) hypothetical protein | Length = 163 |
| | | | | [Lactobacillus casei bacteriophage A2] | |
| SEQ ID N^{o} 1010 | LM-51.1 | Unknown, weakly similar to AraC-like | 17 | gi\|7387707\|sp\|O87389\|GLXA_RHIME TRANSCRIPTIONAL REGULATOR | |
| | | transcription regulator | | GLXA | |
| SEQ ID N^{o} 1011 | LM-510.1 | Unknown | 26 | gi\|6015511\|emb\|CAA63097.1\| (X92187) p22 erf-like protein [unidentified] | Length = 207 |
| SEQ ID N^{o} 1012 | LM-512.1 | Unknown, similar to protein gp49 | 63 | gi\|5823651\|emb\|CAB53839.1\| (AJ242593) gp49 [Bacteriophage A118] | Length = 310 |
| | | [Bacteriophage A118] | | | |
| SEQ ID N^{o} 1013 | LM-514.1 | Unknown, similar to protein gp51 | 59 | gi\|5823653\|emb\|CAB53841.1\| (AJ242593) gp51 [Bacteriophage A118] | Length = 186 |
| | | [Bacteriophage A118] | | | |
| SEQ ID N^{o} 1014 | LM-517.1 | Unknown, similar to a bacteriophage protein | 34 | gi\|5001708\|gb\|AAD37108.1\|AF109874_14 (AF109874) unknown | Length = 131 |
| | | | | [Bacteriophage Tuc2009] | |
| SEQ ID N^{o} 1015 | LM-518.1 | Unknown | 26 | gi\|6226483\|sp\|Q52118\|YMO3_ERWST HYPOTHETICAL 31.4 KDA PROTEIN | |
| | | | | IN MOBD 3′REGION | |
| SEQ ID N^{o} 1016 | LM-520.1 | Unknown | | No Hits found | |
| SEQ ID N^{o} 1017 | LM-527.1 | | | No Hits found | |
| SEQ ID N^{o} 1018 | LM-529.1 | | 37 | gi\|5823599\|emb\|CAB53787.1\| (AJ242593) putative terminase small | Length = 180 |
| | | | | subunit [Bacteriophage A118] | |
| SEQ ID N^{o} 1019 | LM-535.1 | | 56 | gi\|2120257\|pir\|\|S58142 coat protein - phage SPP1 | |
| SEQ ID N^{o} 1020 | LM-541.1 | | 71 | gi\|5823611\|emb\|CAB53799.1\| (AJ242593) gp13 [Bacteriophage A118] | Length = 110 |
| SEQ ID N^{o} 1021 | LM-549.1 | | 94 | gi\|5823615\|emb\|CAB53803.1\| (AJ242593) gp17 [Bacteriophage A118] | Length = 272 |
| SEQ ID N^{o} 1022 | LM-552.1 | | 99 | gi\|5823617\|emb\|CAB53805.1\| (AJ242593) gp19 [Bacteriophage A118] | Length = 342 |
| SEQ ID N^{o} 1023 | LM-553.1 | | 91 | gi\|5823618\|emb\|CAB53806.1\| (AJ242593) gp20 [Bacteriophage A118] | Length = 357 |
| SEQ ID N^{o} 1024 | LM-554.1 | | 86 | gi\|5823619\|emb\|CAB53807.1\| (AJ242593) gp21 [Bacteriophage A118] | Length = 105 |
| SEQ ID N^{o} 1025 | LM-558.1 | | 99 | gi\|2801778\|gb\|AAC38580.1\| (AF042193) peptidoglycan lytic enzyme | Length = 281 |
| | | | | [Listeria monocytogenes] | |
| SEQ ID N^{o} 1026 | LM-559.1 | | | No Hits found | |
| SEQ ID N^{o} 1027 | LM-56.1 | Unknown, similar to hydrolase (esterase) | 43 | gi\|7474811\|pir\|\|E70010 dihydrolipoamide S-acetyltransferase homolog | |
| | | | | yugF - Bacillus subtilis | |
| SEQ ID N^{o} 1028 | LM-560.1 | | 47 | gi\|7460036\|pir\|\|T13226 hypothetical protein R232 - Lactobacillus phage | |
| | | | | phi-gle | |
| SEQ ID N^{o} 1029 | LM-561.1 | | | No Hits found | |
| SEQ ID N^{o} 1030 | LM-587.1 | Unknown, similar to Bacillus anthracis CapA | 63 | gi\|4584121\|emb\|CAB40617.1\| (AJ007788) related sequence M24150 | Length = 367 |
| | | protein (polyglutamate capsule biosynthesis) | | [Bacillus cereus] | |
| SEQ ID N^{o} 1031 | LM-611.1 | Unknown, similar to ornithine | 58 | gi\|6685709\|sp\|O93656\|OTC_PYRAB ORNITHINE | |
| | | carbamoyltransferase | | CARBAMOYLTRANSFERASE (OTCASE) | |
| SEQ ID N^{o} 1032 | LM-613.1 | Unknown, similar to amino acid transporter | 42 | gi\|6009438\|dbj\|BAA84897.1\| (AB024946) orf62 [Escherichia coli] | Length = 486 |
| SEQ ID N^{o} 1033 | LM-614.1 | Unknown, conserved hypothetical protein | 61 | gi\|5712716\|gb\|AAD47622.1\| (AF153708) unknown [Pseudomonas sp. | Length = 376 |
| | | | | BG33R] | |
| SEQ ID N^{o} 1034 | LM-615.1 | carbamate kinase | 76 | gi\|6980398\|pdb\|1B7B\|A Chain A, Carbamate Kinase From Enterococcus | |
| | | | | Faecium | |
| SEQ ID N^{o} 1035 | LM-616.1 | Unknown, conserved hypothetical protein | 58 | gi\|5712716\|gb\|AAD47622.1\| (AF153708) unknown [Pseudomonas sp. | Length = 376 |
| | | | | BG33R] | |
| SEQ ID N^{o} 1036 | LM-617.1 | Unknown, conserved hypothetical protein, | 43 | gi\|4206184\|gb\|AAD11507.1\| (U60828) Unknown [Lactococcus lactis] | Length = 244 |
| | | hypothetical regulator | | | |
| SEQ ID N^{o} 1037 | LM-653.1 | Unknown, similar to flagellar motor switch | 53 | gi\|2120517\|pir\|\|JC4505 flagellar motor switch protein fliY - syphilis | |
| | | protein fliY C-terminal part | | spirochete | |
| SEQ ID N^{o} 1038 | LM-692.1 | Unknown | | No Hits found | |
| SEQ ID N^{o} 1039 | LM-710.1 | | 67 | gi\|2833406\|sp\|Q46829\|BGLA_ECOLI 6-PHOSPHO-BETA-GLUCOSIDASE | |
| | | | | BGLA | |
| SEQ ID N^{o} 1040 | LM-711.2 | | 67 | gi\|730418\|sp\|P40739\|PTBA_BACSU PTS SYSTEM, BETA-GLUCOSIDES- | |
| | | | | SPECIFIC IIABC COMPONENT (EIIABC-BGL) (BETA-GLUCOSIDES- | |
| | | | | PERMEASE IIABC COMPONENT) (PHOSPHOTRANSFERASE | |
| | | | | ENZYME II, ABC COMPONENT) (EII-BGL) | |
| SEQ ID N^{o} 1041 | LM-712.2 | | 70 | gi\|729940\|sp\|P39805\|LICT_BACSU TRANSCRIPTION ANTITERMINATOR | |
| | | | | LICT | |
| SEQ ID N^{o} 1042 | LM-716.1 | | | No Hits found | |
| SEQ ID N^{o} 1043 | LM-721.1 | | 51 | gi\|7434480\|pir\|\|B69785 cellobiose phosphotransferase system enzym | |
| | | | | homolog ydhN - Bacillus subtilis | |
| SEQ ID N^{o} 1044 | LM-723.1 | | 63 | gi\|6002243\|emb\|CAB56688.1\| (AL121596) Beta-glucosidase (EC | Length = 762 |
| | | | | 3.2.1.21) [Streptomyces coelicolor A3(2)] | |
| SEQ ID N^{o} 1045 | LM-724.1 | | 62 | gi\|7450520\|pir\|\|\|A69785 cellobiose phosphotransferase system enzym | |
| | | | | homolog ydhM - Bacillus subtilis | |
| SEQ ID N^{o} 1046 | LM-725.1 | Unknown, similar to cellobiose | 55 | gi\|7449992\|pir\|\|C69785 cellobiose phosphotransferase system enzym | |
| | | phosphotransferase system enzyme IIC | | homolog ydhO - Bacillus subtilis | |
| SEQ ID N^{o} 1047 | LM-726.1 | Unknown, similar to lichenan operon | 55 | gi\|1168885\|sp\|P46321\|CELR_BACSU PUTATIVE CEL OPERON REGULATOR | |
| | | transcription antiterminator licR | | | |
| SEQ ID N^{o} 1048 | LM-728.1 | Unknown | 97 | gi\|4138150\|emb\|CAA07718.1\| (AJ007877) ADP ribosyl glycohydrolase | Length = 327 |
| | | | | [Listeria monocytogenes] | |
| SEQ ID N^{o} 1049 | LM-730.1 | beta-glucoside-specific phosphotransferase | 94 | gi\|4138149\|emb\|CAA07717.1\| (AJ007877) PTS enzyme II [Listeria | Length = 640 |
| | | enzyme II | | monocytogenes] | |
| SEQ ID N^{o} 1050 | LM-731.2 | transcription antiterminator | 96 | gi\|4138148\|emb\|CAA07716.1\| (AJ007877) antiterminator [Listeria | Length = 270 |
| | | | | monocytogenes] | |
| SEQ ID N^{o} 1051 | LM-757.1 | Unknown, similar to internalin proteins | 38 | gi\|2347102\|gb\|AAB67968.1\| (U77367) internalin [Listeria | Length = 821 |
| | | | | monocytogenes] | |
| SEQ ID N^{o} 1052 | LM-80.1 | unknown | | No Hits found | |
| SEQ ID N^{o} 1053 | LM-81 2.1 | Unknown, similar to unknown protein | 43 | gi\|4033715\|gb\|AAC97152.1\| (U49397) unknown [Streptococcus pyogenes] | Length = 591 |
| SEQ ID N^{o} 1054 | LM-842.1 | Unknown | 57 | gi\|1044888\|emb\|CAA63151.1\| (X92423) sepA [Listeria monocytogenes] | Length = 391 |
| SEQ ID N^{o} 1055 | LM-843.1 | Unknown | | No Hits found | |
| SEQ ID N^{o} 1056 | LM-857.1 | Unknown, similar to transcription regulator | 48 | gi\|7443060\|pir\|\|D70044 transcription regulator GntR family homolog yvoA - | |
| | | GntR family | | Bacillus subtilis | |
| SEQ ID N^{o} 1057 | LM-858.1 | Unknown, weakly similar to mannose-6- | 40 | gi\|7480238\|pir\|\|T37128 hypothetical protein SCJ4.45c - Streptomyces | |
| | | phosphate isomerase | | coelicolor | |
| SEQ ID N^{o} 1058 | LM-879.1 | Unknown | 49 | gi\|3786190\|emb\|CAA71106.1\| (Y09988) hypothetical protein [Listeria | Length = 171 |
| | | | | ivanovii] | |
| SEQ ID N^{o} 1059 | LM-880.1 | Unknown | | No Hits found | |
| SEQ ID N^{o} 1060 | LM-881.1 | unknown | | No Hits found | |
| SEQ ID N^{o} 1061 | LM-896.1 | | | No Hits found | |
| SEQ ID N^{o} 1062 | LM-906.1 | Unknown, conserved hypothetical protein | 34 | gi\|7476217\|pir\|\|B70617 hypothetical protein Rv0143c - Mycobacterium | |
| | | | | tuberculosis (strain H37RV) | |
| SEQ ID N^{o} 1063 | LM-924.1 | ABC-transporter ATP binding protein | 60 | gi\|7479118\|pir\|\|T34822 ABC-transporter ATP binding protein - | |
| | | | | Streptomyces coelicolor | |
| SEQ ID N^{o} 1064 | LM-968.1 | Unknown, similar to transposase | 62 | gi\|929968\|gb\|AAA74024.1\| (U30713) ORFA [Bacillus anthracis] | |
| SEQ ID N^{o} 1065 | LM-969.1 | Unknown, similar to transposase (N-terminal | 49 | gi\|7474337\|pir\|\|H59102 hypothetical protein pXO1-96 - Bacillus anthracis | |
| | | part) | | virulence plasmid pXO1 | |
| SEQ ID N^{o} 1066 | LM-970.1 | Unknown, similar to transposase C-terminal | 59 | gi\|7474337\|pir\|\|H59102 hypothetical protein pXO1-96 - Bacillus anthracis | |
| | | part | | virulence plasmid pXO1 | |
| SEQ ID N^{o} 1067 | LM-973.1 | Unknwon, similar to internalin proteins | 24 | gi\|2347105\|gb\|AAB67970.1\| (U77368) inID [Listeria monocytogenes] | Length = 567 |

[0325] Table VI: Legends

[0326] SEQ ID Nos. 2059-2601: nucleotide sequences of 543 genes specific for Listeria innocua Clip11262; with, in the first column, the SEQ ID identifier, in the second column the name of the gene, in the third column the IPF number (<<Pasteur Institute>> identifier number abbreviation, making it possible to correlate the sequence with the sequences of Table V) and in the last column the corresponding annotation.

TABLE VI

| SEQ ID | Name | IPF ID | Function |
|---|---|---|---|
| SEQ ID N° 2059 | pli0001 | 4106.2 | Unknown, similar to insertion sequence ATP binding protein |
| SEQ ID N^{o} 2060 | pli0002 | 6602.1 | Unknown |
| SEQ ID N^{o} 2061 | pli0003 | 4103.1 | Unknown, similar to transposase |
| SEQ ID N^{o} 2062 | pli0004 | 4102.1 | Unknown, similar to DNA methylase |
| SEQ ID N^{o} 2063 | pli0005 | 4099.1 | Unknown |
| SEQ ID N^{o} 2064 | pli0006 | 4098.1 | Unknown |
| SEQ ID N^{o} 2065 | pli0007 | 4097.1 | Unknown |
| SEQ ID N^{o} 2066 | pli0008 | 4095.1 | Unknown, similar to unknown protein |
| SEQ ID N^{o} 2067 | pli0009 | 4092.1 | Unknown, similar to unknown protein |
| SEQ ID N^{o} 2068 | pli0010 | 4088.1 | Unknown |
| SEQ ID N^{o} 2069 | pli0011 | 4086.1 | Unknown, hypothetical gene |
| SEQ ID N^{o} 2070 | pli0012 | 4084.1 | Transposase |
| SEQ ID N^{o} 2071 | pli0013 | 4081.1 | Unknown, similar to unknown protein |
| SEQ ID N^{o} 2072 | pli0014 | 4079.1 | Unknown, similar to unknown protein |
| SEQ ID N^{o} 2073 | pli0015 | 4077.1 | Unknown, similar to plasmid replication protein |
| SEQ ID N^{o} 2074 | pli0016 | 6241.1 | Unknown, similar to transposase C-terminal part |
| SEQ ID N^{o} 2075 | pli0017 | 4073.1 | Unknown |
| SEQ ID N^{o} 2076 | pli0018 | 4195.3 | transposase (truncated) |
| SEQ ID N^{o} 2077 | pli0019 | 4194.3 | Transposase, truncated |
| SEQ ID N^{o} 2078 | pli0020 | 4193.1 | Unknown, similar to transposase |
| SEQ ID N^{o} 2079 | pli0021 | 4192.1 | Unknown, similar to putative helicase |
| SEQ ID N^{o} 2080 | pli0022 | 4184.1 | Unknown, similar to plasmid replication protein B |
| SEQ ID N^{o} 2081 | pli0023 | 4183.1 | unknown, similar to plasmid replication initiation protein |
| SEQ ID N^{o} 2082 | pli0024 | 4182.1 | Unknown, similar to transposase |
| SEQ ID N^{o} 2083 | pli0025 | 4181.1 | Unknown, similar to transposase |
| SEQ ID N^{o} 2084 | pli0026 | 4179.1 | Unknown, similar to gram positive plasmid replication protein B |
| SEQ ID N^{o} 2085 | pli0027 | 4178.1 | Unknown, similar to helicase |
| SEQ ID N^{o} 2086 | pli0028 | 6113.2 | Transposase |
| SEQ ID N^{o} 2087 | pli0029 | 6111.1 | Unknown, similar to DNA methyltransferase |
| SEQ ID N^{o} 2088 | pli0030 | 6109.1 | Unknown |
| SEQ ID N^{o} 2089 | pli0031 | 6606.1 | Unknown |
| SEQ ID N^{o} 2090 | pli0032 | 6106.2 | Transposase |
| SEQ ID N^{o} 2091 | pli0033 | 6128.2 | Pseudogene, similar to C-terminal part of arsenite-translocating ATPase |
| SEQ ID N^{o} 2092 | pli0034 | 6127.1 | Unknown, similar to arsenical resistance operon repressor |
| SEQ ID N^{o} 2093 | pli0035 | 6126.1 | unknown, similar to arsenical resistance operon trans-acting repressor ArsD |
| SEQ ID N^{o} 2094 | pli0036 | 6125.1 | Unknown, similar to arsenical resistance operon repressor |
| SEQ ID N^{o} 2095 | pli0037 | 6124.1 | Unknown, similar to arsenical pump-driving ATPase |
| SEQ ID N^{o} 2096 | pli0038 | 6122.1 | unknown, similar to possible arsenic resistance membrane transport protein ArsB |
| SEQ ID N^{o} 2097 | pli0039 | 6120.1 | Unknown, similar to heavy metal membrane efflux protein |
| SEQ ID N^{o} 2098 | pli0040 | 6118.1 | Unknown, similar to flavoprotein oxidoreductase |
| SEQ ID N^{o} 2099 | pli0041 | 6115.1 | Unknown, similar to ABC transporter ATP-binding protein |
| SEQ ID N^{o} 2100 | pli0042 | 6605.1 | Similar to transposase, N-terminal part |
| SEQ ID N^{o} 2101 | pli0043 | 4177.2 | Transposase |
| SEQ ID N^{o} 2102 | pli0044 | 4175.1 | Unknown, similar to NADH peroxidase |
| SEQ ID N^{o} 2103 | pli0045 | 4174.1 | Pseudogene, similar to glycine-betaine binding protein (ABC transporter) |
| SEQ ID N^{o} 2104 | pli0046 | 4170.1 | Unknown, hypothetical protein |
| SEQ ID N^{o} 2105 | pli0047 | 4169.1 | Unknown |
| SEQ ID N^{o} 2106 | pli0048 | 4168.1 | Unknown, similar to heavy metal-transporting ATPase |
| SEQ lD N^{o} 2107 | pli0049 | 4166.1 | Transposase |
| SEQ ID N^{o} 2108 | pli0050 | 4164.1 | Unknown, similar to the two components sensor protein kdpD |
| SEQ ID N^{o} 2109 | pli0051 | 4160.1 | Unknown, similar to the two components response regulator KdpE |
| SEQ ID N^{o} 2110 | pli0052 | 4158.1 | Unknown, similar to potassium-transporting atpase a chain |
| SEQ ID N^{o} 2111 | pli0053 | 4157.1 | Unknown, similar to potassium-transporting atpase b chain |
| SEQ ID N^{o} 2112 | pli0054 | 4154.1 | Unknown |
| SEQ ID N^{o} 2113 | pli0055 | 4153.1 | Unknown, similar to potassium-transporting atpase c chain |
| SEQ ID N^{o} 2114 | pli0056 | 4150.1 | Unknown, similar to resolvase/integrase |
| SEQ ID N^{o} 2115 | pli0057 | 4148.1 | Unknown, similar to DNA transposition protein |
| SEQ ID N^{o} 2116 | pli0058 | 4147.1 | Unknown, similar to transposase |
| SEQ ID N^{o} 2117 | pli0059 | 4146.1 | Unknown, similar to invertase |
| SEQ ID N^{o} 2118 | pli0060 | 4145.1 | Unknown, similar to cadmium resistance accessory protein |
| SEQ ID N^{o} 2119 | pli0062 | 4140.1 | Unknown, similar to unknown protein |
| SEQ ID N^{o} 2120 | pli0063 | 4139.1 | Unknown, similar to transposase |
| SEQ ID N^{o} 2121 | pli0064 | 4138.1 | Unknown, similar to unknown protein |
| SEQ ID N^{o} 2122 | pli0065 | 4137.1 | Unknown |
| SEQ ID N^{o} 2123 | pli0066 | 4136.1 | Unknown |
| SEQ ID N^{o} 2124 | pli0067 | 4135.1 | Unknown, similar to UV-damage repair protein |
| SEQ ID N^{o} 2125 | pli0068 | 4132.1 | Unknown, similar to unknown protein |
| SEQ ID N^{o} 2126 | pli0069 | 4130.1 | Unknown, similar to plasmid copy control protein repB |
| SEQ ID N^{o} 2127 | pli0070 | 4128.1 | Unknown, similar to plasmid replication protein |
| SEQ ID N^{o} 2128 | pli0071 | 4124.1 | Unknown, similar to transposase |
| SEQ ID N^{o} 2129 | pli0072 | 4123.1 | Unknown, similar to transposase |
| SEQ ID N^{o} 2130 | pli0073 | 4122.1 | unknown |
| SEQ ID N^{o} 2131 | pli0074 | 4121.1 | Unknown |
| SEQ ID N^{o} 2132 | pli0075 | 4120.1 | Unknown |
| SEQ ID N^{o} 2133 | pli0076 | 4116.1 | Transposase |
| SEQ ID N^{o} 2134 | pli0077 | 4113.1 | Unknown, similar to transposase N-terminal part |
| SEQ ID N^{o} 2135 | pli0078 | 4112.1 | Unknown, similar to enolase (phosphopyruvate hydratase), truncated C-terminal end |
| SEQ ID N^{o} 2136 | pli0079 | 4111.1 | Unknown, similar to Na+/H+ antiporter |
| SEQ ID N^{o} 2137 | pli0080 | 4107.2 | Unknown |
| SEQ ID N^{o} 2138 | Lin0059 | 4543.1 | Unknown |
| SEQ ID N^{o} 2139 | Lin0060 | 4535.1 | unknown |
| SEQ ID N^{o} 2140 | Lin0061 | 4533.1 | unknown, hypothetical protein |
| SEQ ID N^{o} 2141 | Lin0062 | 4532.1 | unknown, hypothetical protein |
| SEQ ID N^{o} 2142 | Lin0063 | 4531.1 | Unknown, pseudogene |
| SEQ ID N^{o} 2143 | Lin0064 | 4522.1 | unknown |
| SEQ ID N^{o} 2144 | Lin0065 | 4521.1 | unknown |
| SEQ ID N^{o} 2145 | Lin0066 | 4520.1 | Unknwon |
| SEQ ID N^{o} 2146 | Lin0071 | 4508.1 | Unknown, similar to integrase |
| SEQ ID N^{o} 2147 | Lin0072 | 4506.1 | unknown |
| SEQ ID N^{o} 2148 | Lin0073 | 4503.2 | Unknown, similar to a putative repressor protein [Bacteriophage A118] |
| SEQ ID N^{o} 2149 | Lin0074 | 6149.2 | unknown, highly similar to gp37 [Bacteriophage A118] |
| SEQ ID N^{o} 2150 | Lin0075 | 6148.2 | unknown, highly similar to gp37-1 [Bacteriophage A118] |
| SEQ ID N^{o} 2151 | Lin0076 | 6544.1 | Unknown |
| SEQ ID N^{o} 2152 | Lin0077 | 6317.1 | unknown, identical to gp40 [Bacteriophage A118] |
| SEQ ID N^{o} 2153 | Lin0079 | 6145.1 | unknown |
| SEQ ID N^{o} 2154 | Lin0080 | 6144.1 | unknown, similar to similar to anti-repressor [Bacteriophage A118] |
| SEQ ID N^{o} 2155 | Lin0081 | 6142.1 | unknown, highly similar to gp43 [Bacteriophage A118] |
| SEQ ID N^{o} 2156 | Lin0082 | 6453.2 | Unknown |
| SEQ ID N^{o} 2157 | Lin0083 | 6139.1 | unknown, highly similar to gp45 [Bacteriophage A118] |
| SEQ ID N^{o} 2158 | Lin0084 | 6138.3 | unknown, highly similar to gp47 [Bacteriophage A118] |
| SEQ ID N^{o} 2159 | Lin0085 | 6136.2 | putative recombinase [Bacteriophage A118] |
| SEQ ID N^{o} 2160 | Lin0086 | 3386.1 | Unknown, similar to protein gp49 |
| SEQ ID N^{o} 2161 | Lin0087 | 6543.1 | Unknown, similar to phage protein |
| SEQ ID N^{o} 2162 | Lin0089 | 3379.1 | unknown, similar to gp51 [Bacteriophage A118] |
| SEQ ID N^{o} 2163 | Lin0090 | 3378.1 | unknown, |
| SEQ ID N^{o} 2164 | Lin0091 | 3375.1 | unknown, similar to phage proteins |
| SEQ ID N^{o} 2165 | Lin0092 | 6542.1 | Unknown |
| SEQ ID N^{o} 2166 | Lin0093 | 3374.1 | unknown |
| SEQ ID N^{o} 2167 | Lin0094 | 3373.1 | unknown, highly similar to gp55 [Bacteriophage A118] |
| SEQ ID N^{o} 2168 | Lin0095 | 3371.1 | unknown, highly similar to gp59 [Bacteriophage A118] |
| SEQ ID N^{o} 2169 | Lin0096 | 3370.1 | unknown |
| SEQ ID N^{o} 2170 | Lin0102 | 3363.1 | unknown |
| SEQ ID N^{o} 2171 | Lin0103 | 3362.1 | unknown |
| SEQ ID N^{o} 2172 | Lin0104 | 3361.1 | unknown, highly similar to putative terminase small subunit [Bacteriophage A118] |
| SEQ ID N^{o} 2173 | Lin0109 | 3354.1 | unknown, highly similar to major capsid protein [Bacteriophage A118] |
| SEQ ID N^{o} 2174 | Lin0110 | 6540.1 | Protein gp7 [Bacteriophage A118] |
| SEQ ID N^{o} 2175 | Lin0116 | 3345.1 | unknown, highly similar to gp13 [Bacteriophage A118](truncated, C-terminal end) |
| SEQ ID N^{o} 2176 | Lin0120 | 3333.1 | unknown, highly similar to gp17 [Bacteriophage A118] |
| SEQ ID N^{o} 2177 | Lin0121 | 3330.1 | unknown, highly similar to gp18 [Bacteriophage A118] |
| SEQ ID N^{o} 2178 | Lin0122 | 3329.1 | unknown, highly similar to gp19 [Bacteriophage A118] |
| SEQ ID N^{o} 2179 | Lin0123 | 3326.1 | unknown, similar to gp20 [Bacteriophage A118] |
| SEQ ID N^{o} 2180 | Lin0124 | 3325.1 | Unknown |
| SEQ ID N^{o} 2181 | Lin0125 | 6539.1 | Unknown |
| SEQ ID N^{o} 2182 | Lin0128 | 3320.1 | L-alanoyl-D-glutamate peptidase [Bacteriophage A500 from Listeria] |
| SEQ ID N^{o} 2183 | Lin0129 | 3319.1 | Unknown |
| SEQ ID N^{o} 2184 | Lin0140 | 3291.1 | unknown |
| SEQ ID N^{o} 2185 | Lin0141 | 3290.1 | Unknown, putative peptidoglycan bound protein (LPXTG motif) |
| SEQ ID N^{o} 2186 | Lin0142 | 3283.1 | unknown |
| SEQ ID N^{o} 2187 | Lin0148 | 3273.1 | Unknown, similar to unknown protein |
| SEQ ID N^{o} 2188 | Lin0154 | 3255.1 | Unknown, similar to unknown protein |
| SEQ ID N^{o} 2189 | Lin0167 | 3232.1 | Unknown |
| SEQ ID N^{o} 2190 | Lin0187 | 3183.1 | Unknown |
| SEQ ID N^{o} 2191 | Lin0188 | 3180.1 | Unknown |
| SEQ ID N^{o} 2192 | Lin0189 | 6538.1 | Unknown |
| SEQ ID N^{o} 2193 | Lin0197 | 3160.1 | unknown, similar to chloromuconate cycloisomerase ykfB of B. subtilis |
| SEQ ID N^{o} 2194 | Lin0198 | 3159.1 | unknown, P45 related protein |
| SEQ ID N^{o} 2195 | Lin0199 | 3157.1 | unknown, some similarities to probable beta-lactamase |
| SEQ ID N^{o} 2196 | Lin0200 | 3152.1 | Unknown, similar to ABC transporter oligopeptide-binding protein |
| SEQ ID N^{o} 2197 | Lin0201 | 3148.1 | Unknown, similar to dipeptide ABC transporter |
| SEQ ID N^{o} 2198 | Lin0202 | 3147.1 | unknwon, surface anchored protein (LPXTG motif) |
| SEQ ID N^{o} 2199 | Lin0290 | 1614.1 | unknown, internalin like protein (LPXTG motif) |
| SEQ ID N^{o} 2200 | Lin0295 | 1601.1 | Unknown, similar to internalin proteins |
| SEQ ID N^{o} 2201 | Lin0307 | 1578.1 | unknown, similar to ABC transporters (ATP-binding protein) |
| SEQ ID N^{o} 2202 | Lin0308 | 1577.1 | unknown, similar to hypothetical proteins |
| SEQ ID N^{o} 2203 | Lin0332 | 1526.1 | unknown, similar to putative permeases |
| SEQ ID N^{o} 2204 | Lin0338 | 1513.1 | unknown |
| SEQ ID N^{o} 2205 | Lin0345 | 1492.1 | unknown |
| SEQ ID N^{o} 2206 | Lin0349 | 1484.1 | Unknown |
| SEQ ID N^{o} 2207 | Lin0357 | 1466.1 | Unknown |
| SEQ ID N^{o} 2208 | Lin0372 | 1442.1 | unknown, probable cell surface protein (LPXTG motif) |
| SEQ ID N^{o} 2209 | Lin0397 | 1390.1 | unknown |
| SEQ ID N^{o} 2210 | Lin0398 | 1389.1 | unknown |
| SEQ ID N^{o} 2211 | Lin0399 | 1388.1 | unknown |
| SEQ ID N^{o} 2212 | Lin0415 | 1348.1 | unknown, probable cell surface protein (LPXTG motif) |
| SEQ ID N^{o} 2213 | Lin0416 | 1346.1 | Unknown, similar to transcription regulator |
| SEQ ID N^{o} 2214 | Lin0417 | 1345.1 | Unknown, similar to unknown protein |
| SEQ ID N^{o} 2215 | Lin0418 | 1344.1 | Unknown, similar to ABC transporter, ATP-binding protein |
| SEQ ID N^{o} 2216 | Lin0419 | 1342.1 | Unknown, similar to ABC transporter, ATP-binding protein |
| SEQ ID N^{o} 2217 | Lin0426 | 1323.1 | Unknown |
| SEQ ID N^{o} 2218 | Lin0453 | 1260.1 | unknown |
| SEQ ID N^{o} 2219 | Lin0454 | 1259.1 | unknown, similar to cell wall-associated protein precursor wapA (B. subtilis) |
| SEQ ID N^{o} 2220 | Lin0455 | 1239.1 | unknown |
| SEQ ID N^{o} 2221 | Lin0456 | 1236.1 | unknown |
| SEQ ID N^{o} 2222 | Lin0464 | 1216.1 | Unknown, similar to putative transcription regulator |
| SEQ ID N^{o} 2223 | Lin0465 | 1215.1 | unknown, conserved hypothetical protein, similar to yoaZ B. subtilis |
| SEQ ID N^{o} 2224 | Lin0476 | 1191.1 | unknown |
| SEQ ID N^{o} 2225 | Lin0477 | 1188.1 | unknown |
| SEQ ID N^{o} 2226 | Lin0478 | 1186.1 | unknown |
| SEQ ID N^{o} 2227 | Lin0479 | 1183.1 | Unknown |
| SEQ ID N^{o} 2228 | Lin0480 | 6504.1 | Unknown, putative secreted protein |
| SEQ ID N^{o} 2229 | Lin0481 | 6525.1 | pseudogene |
| SEQ ID N^{o} 2230 | Lin0486 | 1171.1 | unknown, similar to unknown proteins |
| SEQ ID N^{o} 2231 | Lin0510 | 1125.1 | Unknown |
| SEQ ID N^{o} 2232 | Lin0521 | 1096.1 | Unknown, similar to HsdR type IC restriction subunit |
| SEQ ID N^{o} 2233 | Lin0522 | 1091.1 | Unknown, similar to HsdM type IC modification subunit |
| SEQ ID N^{o} 2234 | Lin0523 | 1088.1 | Unknown, similar to specificity determinant HsdS |
| SEQ ID N^{o} 2235 | Lin0524 | 1087.1 | Unknown, similar to bacteriophage integrase |
| SEQ ID N^{o} 2236 | Lin0525 | 1086.1 | Unknown, similar to specificity determinant HsdS |
| SEQ ID N^{o} 2237 | Lin0553 | 1021.1 | Unknown, similar to internalin protein |
| SEQ ID N^{o} 2238 | Lin0554 | 1018.1 | unknown, probable cell surface protein (LPXTG motif) |
| SEQ ID N^{o} 2239 | Lin0557 | 1012.1 | Unknown |
| SEQ ID N^{o} 2240 | Lin0558 | 1010.1 | Unknown, similar to internalin protein |
| SEQ ID N^{o} 2241 | Lin0559 | 1007.1 | unknown, probable cell surface protein (LPXTG motif) |
| SEQ ID N^{o} 2242 | Lin0560 | 1005.1 | Unknown |
| SEQ ID N^{o} 2243 | Lin0561 | 1004.1 | Unknown, similar to unknown protein |
| SEQ ID N^{o} 2244 | Lin0661 | 815.1 | unknown, internalin like protein (LPXTG motif) |
| SEQ ID N^{o} 2245 | Lin0665 | 805.1 | unknown, highly similar to ORFA of Listeria seeligeri, (LPXTG motif) |
| SEQ ID N^{o} 2246 | Lin0677 | 781.1 | unknown, conserved hypothetical protein |
| SEQ ID N^{o} 2247 | Lin0678 | 779.1 | Unknown |
| SEQ ID N^{o} 2248 | Lin0679 | 776.1 | Unknown, similar to unknown protein |
| SEQ ID N^{o} 2249 | Lin0739 | 652.1 | unknown, internalin like protein (LPXTG) |
| SEQ ID N^{o} 2250 | Lin0740 | 648.1 | unknown, probable cell surface protein (LPXTG motif) |
| SEQ ID N^{o} 2251 | Lin0746 | 639.1 | Unknown, similar to ABC transporter, ATP-binding protein (truncated, N-terminal part) |
| SEQ ID N^{o} 2252 | Lin0772 | 589.1 | unknown |
| SEQ ID N^{o} 2253 | Lin0801 | 529.1 | unknown, similar to two-component response regulators |
| SEQ ID N^{o} 2254 | Lin0802 | 528.2 | unknown, similar to two-component sensor histidine kinases |
| SEQ ID N^{o} 2255 | Lin0803 | 526.1 | Unknown, surface protein (LPXTG motif) |
| SEQ ID N^{o} 2256 | Lin0804 | 523.1 | Unknown, similar to unknown protein |
| SEQ ID N^{o} 2257 | Lin0805 | 522.1 | Unknown, similar to oxidoreductase |
| SEQ ID N^{o} 2258 | Lin0806 | 521.1 | Unknown, similar to transcriptional regulator, MerR family |
| SEQ ID N^{o} 2259 | Lin0822 | 485.1 | Unknown, similar to transport protein (Truncated, N-terminal part) |
| SEQ ID N^{o} 2260 | Lin0823 | 484.1 | Unknown, similar to transport protein (truncated, C-terminal part) |
| SEQ ID N^{o} 2261 | Lin0827 | 472.1 | unknown, similar to transposase |
| SEQ ID N^{o} 2262 | Lin0833 | 457.1 | unknown |
| SEQ ID N^{o} 2263 | Lin0834 | 455.1 | unknown, some similarities to hypothetical proteins |
| SEQ ID N^{o} 2264 | Lin0835 | 454.1 | unknown |
| SEQ ID N^{o} 2265 | Lin0842 | 440.1 | Unknown, similar to amidases |
| SEQ ID N^{o} 2266 | Lin0864 | 395.1 | Unknown, similar to transcription regulator |
| SEQ ID N^{o} 2267 | Lin0865 | 394.1 | unknown, hypothetical protein |
| SEQ ID N^{o} 2268 | Lin0866 | 392.1 | unknown, similar to ABC transporters, ATP-binding protein homologue |
| SEQ ID N^{o} 2269 | Lin0867 | 391.1 | unknown |
| SEQ ID N^{o} 2270 | Lin0868 | 390.1 | unknown |
| SEQ ID N^{o} 2271 | Lin0877 | 372.1 | unknown (truncated, N-terminal part) |
| SEQ ID N^{o} 2272 | Lin0878 | 371.1 | unknown (truncated, C-terminal part) |
| SEQ ID N^{o} 2273 | Lin0903 | 325.1 | Unknown, truncated N-terminal part |
| SEQ ID N^{o} 2274 | Lin0904 | 324.1 | Unknown (truncated, C-terminal end) |
| SEQ ID N^{o} 2275 | Lin0915 | 302.1 | Unknown, similar to phosphotransferase system enzyme IIC (truncated, N-terminal end) |
| SEQ ID N^{o} 2276 | Lin0916 | 301.1 | Unknown, similar to phosphotransferase system enzyme IIC (truncated, C-terminal end) |
| SEQ ID N^{o} 2277 | Lin0940 | 6518.1 | unknown, similar to heat shock protein HtpG (truncated, C-terminal part) |
| SEQ ID N^{o} 2278 | Lin1056 | 36.1 | unknown |
| SEQ ID N^{o} 2279 | Lin1064 | 20.1 | unknown, similar to autolysin (amidase) |
| SEQ ID N^{o} 2280 | Lin1065 | 17.3 | Unknown |
| SEQ ID N^{o} 2281 | Lin1066 | 14.4 | unknown, similar to dolichol phosphate mannose synthase |
| SEQ ID N^{o} 2282 | Lin1067 | 13.1 | unknown |
| SEQ ID N^{o} 2283 | Lin1068 | 12.1 | unknown, similar to hypothetical protein 3 (capsulation locus) of Haemophilus influenzae |
| SEQ ID N^{o} 2284 | Lin1069 | 9.1 | unknown |
| SEQ ID N^{o} 2285 | Lin1073 | 3.1 | unknown, similar to galactosamine-containing minor teichoic acid biosynthesis protein GgaA |
| SEQ ID N^{o} 2286 | Lin1074 | 2.2 | Unknown, similar to B. subtilis TagF protein (probable CDPglycerol glycerophosphotransferase) |
| SEQ ID N^{o} 2287 | Lin1075 | 4502.2 | unknown, similar to teichoic acid biosynthesis protein B precursor |
| SEQ ID N^{o} 2288 | Lin1082 | 4486.1 | unknown |
| SEQ ID N^{o} 2289 | Lin1083 | 4485.1 | unknown |
| SEQ ID N^{o} 2290 | Lin1084 | 4484.1 | Unknown |
| SEQ ID N^{o} 2291 | Lin1085 | 4483.1 | unknown |
| SEQ ID N^{o} 2292 | Lin1086 | 4482.1 | unknown |
| SEQ ID N^{o} 2293 | Lin1090 | 4478.1 | unknown |
| SEQ ID N^{o} 2294 | Lin1091 | 4477.1 | unknown |
| SEQ ID N^{o} 2295 | Lin1099 | 4460.1 | unknown |
| SEQ ID N^{o} 2296 | Lin1100 | 4459.1 | unknown |
| SEQ ID N^{o} 2297 | Lin1177 | 4309.1 | unknown |
| SEQ ID N^{o} 2298 | Lin1204 | 4232.1 | unknown, similar to internalin proteins (LPXTG motif) |
| SEQ ID N^{o} 2299 | Lin1209 | 4220.1 | unknown |
| SEQ ID N^{o} 2300 | Lin1210 | 4219.1 | unknown |
| SEQ ID N^{o} 2301 | Lin1211 | 4218.1 | unknown |
| SEQ ID N^{o} 2302 | Lin1212 | 4217.1 | unknown |
| SEQ ID N^{o} 2303 | Lin1220 | 6513.1 | Unknown |
| SEQ ID N^{o} 2304 | Lin1231 | 6002.1 | Unknown, similar to site-specific recombinase for integration and excision [bacteriophage phi-105] |
| SEQ ID N^{o} 2305 | Lin1232 | 6003.1 | Unknown, similar to unknown protein |
| SEQ ID N^{o} 2306 | Lin1233 | 6005.1 | Unknown, similar to bacteriophage phi-105 ORF2 protein |
| SEQ ID N^{o} 2307 | Lin1234 | 6006.4 | Unknown, similar to immunity repressor [bacteriophage phi-105] |
| SEQ ID N^{o} 2308 | Lin1235 | 6007.4 | Unknown, similar to transcription regulator |
| SEQ ID N^{o} 2309 | Lin1236 | 6189.4 | Unknown |
| SEQ ID N^{o} 2310 | Lin1237 | 6512.2 | Unknown |
| SEQ ID N^{o} 2311 | Lin1238 | 6511.1 | Unknown |
| SEQ ID N^{o} 2312 | Lin1239 | 6188.1 | Unknown |
| SEQ ID N^{o} 2313 | Lin1240 | 6186.1 | Unknown |
| SEQ ID N^{o} 2314 | Lin1241 | 6185.5 | Unknown, similar to bacteriophage protein |
| SEQ ID N^{o} 2315 | Lin1242 | 6658.1 | unknown, some similarities to phage related proteins |
| SEQ ID N^{o} 2316 | Lin1243 | 6659.1 | unknown, similar to hypothetical protein 44 - Staphylococcus aureus phage phi PVL |
| SEQ ID N^{o} 2317 | Lin1244 | 6660.1 | unknown |
| SEQ ID N^{o} 2318 | Lin1245 | 6661.1 | unknown, similarities Staphylococcus aureus prophage phiPV83 |
| SEQ ID N^{o} 2319 | Lin1246 | 6662.1 | unknown |
| SEQ ID N^{o} 2320 | Lin1247 | 6663.1 | unknown |
| SEQ ID N^{o} 2321 | Lin1248 | 6664.1 | unknown, similar to hypothetical protein, Staphylococcus aureus phage phi PVL |
| SEQ ID N^{o} 2322 | Lin1249 | 6665.1 | unknown |
| SEQ ID N^{o} 2323 | Lin1250 | 6666.1 | unknown |
| SEQ ID N^{o} 2324 | Lin1251 | 6667.1 | Unknown |
| SEQ ID N^{o} 2325 | Lin1252 | 6668.1 | Unknown |
| SEQ ID N^{o} 2326 | Lin1253 | 6669.1 | Unknown |
| SEQ ID N^{o} 2327 | Lin1254 | 6670.1 | unknown, similar to phage intagrase proteins |
| SEQ ID N^{o} 2328 | Lin1255 | 6671.1 | unknown |
| SEQ ID N^{o} 2329 | Lin1256 | 6040.3 | Unknown |
| SEQ ID N^{o} 2330 | Lin1257 | 2999.2 | Unknown |
| SEQ ID N^{o} 2331 | Lin1258 | 2998.1 | Unknown |
| SEQ ID N^{o} 2332 | Lin1259 | 2997.1 | Unknown, similar to protein gp66 [Bacteriophage A118] |
| SEQ ID N^{o} 2333 | Lin1260 | 6202.2 | unknown, similar to probable antirepressor - Bacillus subtilis |
| | | | phage SPBc2 |
| SEQ ID N^{o} 2334 | Lin1261 | 5611.4 | Unknown |
| SEQ ID N^{o} 2335 | Lin1262 | 5609.3 | Unknown |
| SEQ ID N^{o} 2336 | Lin1263 | 6588.1 | Unknown |
| SEQ ID N^{o} 2337 | Lin1264 | 5606.1 | Unknown |
| SEQ ID N^{o} 2338 | Lin1265 | 5605.1 | Unknown |
| SEQ ID N^{o} 2339 | Lin1266 | 5604.1 | Unknown, similar to phage protein |
| SEQ ID N^{o} 2340 | Lin1267 | 5602.1 | Unknown, similar to a B. subtilis PBSX phage protein |
| SEQ ID N^{o} 2341 | Lin1268 | 5600.1 | Unknown, similar to a B. subtilis PBSX phage protein |
| SEQ ID N^{o} 2342 | Lin1269 | 5597.1 | Unknown, similar to unknown protein |
| SEQ ID N^{o} 2343 | Lin1270 | 5593.1 | Unknown, similar to a B. subtilis PBSX phage protein |
| SEQ ID N^{o} 2344 | Lin1271 | 5590.1 | Unknown, similar to a B. subtilis PBSX phage protein |
| SEQ ID N^{o} 2345 | Lin1272 | 6394.1 | unknown |
| SEQ ID N^{o} 2346 | Lin1273 | 5587.1 | Unknown, similar to unknown protein |
| SEQ ID N^{o} 2347 | Lin1274 | 5586.1 | Unknown, similar to a B. subtilis PBSX phage protein |
| SEQ ID N^{o} 2348 | Lin1275 | 5584.1 | Unknown, similar to a B. subtilis PBSX phage protein |
| SEQ ID N^{o} 2349 | Lin1276 | 5583.1 | Unknown, similar to a B. subtilis PBSX phage protein |
| SEQ ID N^{o} 2350 | Lin1277 | 5580.1 | unknown |
| SEQ ID N^{o} 2351 | Lin1278 | 5579.1 | Unknown, similar to a B. subtilis PBSX phage protein |
| SEQ ID N^{o} 2352 | Lin1279 | 5577.1 | Unknown, similar to a B. subtilis PBSX phage protein |
| SEQ ID N^{o} 2353 | Lin1280 | 5576.1 | Unknown, similar to a B. subtilis PBSX phage protein |
| SEQ ID N^{o} 2354 | Lin1281 | 6636.1 | Unknown, similar to phage protein (truncated, C-terminal end) |
| SEQ ID N^{o} 2355 | Lin1282 | 5575.1 | Unknown, similar to phage proteins |
| SEQ ID N^{o} 2356 | Lin1283 | 5569.1 | Unknown, similar to a B. subtilis PBSX prophage protein |
| SEQ ID N^{o} 2357 | Lin1284 | 5568.1 | Unknown, similar to a B. subtilis PBSX prophage protein |
| SEQ ID N^{o} 2358 | Lin1285 | 5567.1 | Unknown, similar to a B. subtilis PBSX prophage protein |
| SEQ ID N^{o} 2359 | Lin1286 | 5565.1 | Unknown, similar to a B. subtilis PBSX prophage protein |
| SEQ ID N^{o} 2360 | Lin1287 | 5564.1 | Unknown, similar to a B. subtilis PBSX prophage protein |
| SEQ ID N^{o} 2361 | Lin1288 | 5561.1 | Unknown, similar to a B. subtilis PBSX prophage protein |
| SEQ ID N^{o} 2362 | Lin1289 | 5560.1 | Unknown, similar to unknown protein |
| SEQ ID N^{o} 2363 | Lin1290 | 5558.1 | Unknown |
| SEQ ID N^{o} 2364 | Lin1291 | 5556.1 | Unknown |
| SEQ ID N^{o} 2365 | Lin1292 | 6589.1 | Unknown |
| SEQ ID N^{o} 2366 | Lin1293 | 5555.1 | Unknown |
| SEQ ID N^{o} 2367 | Lin1294 | 5553.1 | Unknown |
| SEQ ID N^{o} 2368 | Lin1295 | 5551.1 | Unknown, similar to holin |
| SEQ ID N^{o} 2369 | Lin1296 | 5550.1 | unknown, similar to hypothetical protein - phage SPP1 |
| SEQ ID N^{o} 2370 | Lin1297 | 6590.1 | Unknown, similar to Portein gp28 [Bacteriophage A118] |
| SEQ ID N^{o} 2371 | Lin1298 | 5546.1 | unknown |
| SEQ ID N^{o} 2372 | Lin1299 | 5545.1 | unknown |
| SEQ ID N^{o} 2373 | Lin1300 | 5543.1 | unknown |
| SEQ ID N^{o} 2374 | Lin1301 | 5541.1 | Unknown |
| SEQ ID N^{o} 2375 | Lin1302 | 6591.1 | Unknown |
| SEQ ID N^{o} 2376 | Lin1328 | 5484.1 | unknown, internalin like protein (LPXTG motif) |
| SEQ ID N^{o} 2377 | Lin1378 | 6432.2 | Unknown, weakly similar to B. subtilis comG |
| | | | operon protein 7 (comGG) |
| SEQ ID N^{o} 2378 | Lin1379 | 2316.2 | Unknown, similar to B. subtilis comG operon protein 6 |
| SEQ ID N^{o} 2379 | Lin1381 | 2318.1 | Unknown, similar to comG operon protein 4 (comGD) |
| SEQ ID N^{o} 2380 | Lin1450 | 2451.1 | Unknown |
| SEQ ID N^{o} 2381 | Lin1451 | 2455.1 | Unknwon |
| SEQ ID N^{o} 2382 | Lin1452 | 2456.1 | unknown |
| SEQ ID N^{o} 2383 | Lin1618 | 2777.1 | Unknown, similar to a protein encoded by Th916 |
| SEQ ID N^{o} 2384 | Lin1619 | 2778.1 | Unknown |
| SEQ ID N^{o} 2385 | Lin1620 | 2779.1 | Unknown, similar to putative iron-sulfur flavoprotein |
| SEQ ID N^{o} 2386 | Lin1621 | 2781.1 | unknown, similar to ketoacyl reductases |
| SEQ ID N^{o} 2387 | Lin1622 | 2783.1 | Unknown, similar to transcriptional regulator (MerR family) |
| SEQ ID N^{o} 2388 | Lin1623 | 2785.1 | Unknown, similar to site-specific recombinase tnpX - Clostridium perfringens transposon Tn4451 |
| | | | (N terminal part) |
| SEQ ID N^{o} 2389 | Lin1624 | 2788.1 | unknown, similar to site-specific recombinase tnpX - Clostridium perfringens transposon Tn4451 |
| SEQ ID N^{o} 2390 | Lin1695 | 2923.1 | Unknown, similar to unknown protein |
| SEQ ID N^{o} 2391 | Lin1696 | 2924.1 | unknown |
| SEQ ID N^{o} 2392 | Lin1700 | 2934.1 | Unknown, similar to N-acetylmuramoyl-L-alanine amidase (N-terminal part) and to L-alanoyl-D- |
| | | | glutamate peptidase (C-terminal part) |
| SEQ ID N^{o} 2393 | Lin1701 | 6597.1 | Unknown |
| SEQ ID N^{o} 2394 | Lin1702 | 6598.1 | Unknown similar to holin from bacteriophage |
| SEQ ID N^{o} 2395 | Lin1703 | 2937.1 | unknown |
| SEQ ID N^{o} 2396 | Lin1704 | 2939.1 | Unknown |
| SEQ ID N^{o} 2397 | Lin1705 | 2940.1 | Unknown |
| SEQ ID N^{o} 2398 | Lin1706 | 6599.1 | Unknown, similar to protein gp22 [Bacteriophage A118] |
| SEQ ID N^{o} 2399 | Lin1707 | 2941.1 | Unknown |
| SEQ ID N^{o} 2400 | Lin1708 | 2942.1 | Unknown |
| SEQ ID N^{o} 2401 | Lin1709 | 2943.1 | Unknown |
| SEQ ID N^{o} 2402 | Lin1710 | 2944.2 | Unknown, similar to unknown protein |
| SEQ ID N^{o} 2403 | Lin1711 | 2945.2 | Unknown |
| SEQ ID N^{o} 2404 | Lin1712 | 2946.2 | Unknown |
| SEQ ID N^{o} 2405 | Lin1713 | 2947.1 | Unknown |
| SEQ ID N^{o} 2406 | Lin1714 | 2949.1 | Unknown |
| SEQ ID N^{o} 2407 | Lin1715 | 2950.1 | Unknown |
| SEQ ID N^{o} 2408 | Lin1716 | 2958.1 | Unknown, similar to minor capsid protein 1608 - Lactobacillus phage phi-gle |
| SEQ ID N^{o} 2409 | Lin1717 | 2959.1 | Unknown |
| SEQ ID N^{o} 2410 | Lin1718 | 2961.1 | unknown |
| SEQ ID N^{o} 2411 | Lin1719 | 2964.1 | unknown |
| SEQ ID N^{o} 2412 | Lin1720 | 2966.1 | unknown, weakly similar to hypothetical protein of bacteriophage Felix 01 |
| SEQ ID N^{o} 2413 | Lin1721 | 2967.1 | unknown |
| SEQ ID N^{o} 2414 | Lin1722 | 2968.1 | unknown |
| SEQ ID N^{o} 2415 | Lin1723 | 2969.1 | unknown |
| SEQ ID N^{o} 2416 | Lin1724 | 2970.1 | unknown |
| SEQ ID N^{o} 2417 | Lin1725 | 2973.1 | unknown |
| SEQ ID N^{o} 2418 | Lin1726 | 2975.1 | unknown, similar to hypothetical proteins |
| SEQ ID N^{o} 2419 | Lin1727 | 2976.1 | unknown |
| SEQ ID N^{o} 2420 | Lin1728 | 2978.1 | unknown, similar to hypothetical proteins |
| SEQ ID N^{o} 2421 | Lin1729 | 6600.1 | Unknown |
| SEQ ID N^{o} 2422 | Lin1730 | 2981.1 | unknown, some similarities to plasmid-related proteins |
| SEQ ID N^{o} 2423 | Lin1731 | 2982.1 | unknown, some similarities to conserved hypothetical proteins |
| SEQ ID N^{o} 2424 | Lin1732 | 2985.1 | unknown, some similarities to phage related proteins |
| SEQ ID N^{o} 2425 | Lin1733 | 2987.1 | unknown, weakly similar to phage related proteins |
| SEQ ID N^{o} 2426 | Lin1734 | 2988.1 | unknown |
| SEQ ID N^{o} 2427 | Lin1735 | 2989.1 | Unknown |
| SEQ ID N^{o} 2428 | Lin1736 | 6601.1 | Unknown |
| SEQ ID N^{o} 2429 | Lin1737 | 2993.1 | unknown, weakly similar to methyltransferases |
| SEQ ID N^{o} 2430 | Lin1738 | 2995.3 | Unknown, similar to a putative antirepressor [Bacteriophage SPBc2] |
| SEQ ID N^{o} 2431 | Lin1739 | 6045.4 | unknown, similar to protein gp66 of Bacteriophage A118 |
| SEQ ID N^{o} 2432 | Lin1740 | 6043.1 | unknown, similar to hypothetical protein of Lactobacillus phage phi-gle |
| SEQ ID N^{o} 2433 | Lin1741 | 6042.1 | unknown, similar to hypothetical protein from phage P2 |
| SEQ ID N^{o} 2434 | Lin1742 | 6038.1 | unknown |
| SEQ ID N^{o} 2435 | Lin1743 | 6037.1 | unknown, similar to phage intagrase proteins |
| SEQ ID N^{o} 2436 | Lin1744 | 6035.1 | unknown |
| SEQ ID N^{o} 2437 | Lin1745 | 6032.1 | unknown |
| SEQ ID N^{o} 2438 | Lin1746 | 6574.1 | Unknown |
| SEQ ID N^{o} 2439 | Lin1747 | 6030.1 | unknown |
| SEQ ID N^{o} 2440 | Lin1748 | 6029.1 | unknown |
| SEQ ID N^{o} 2441 | Lin1749 | 6028.1 | unknown, similar to hypothetical protein, Staphylococcus aureus phage phi PVL |
| SEQ ID N^{o} 2442 | Lin1750 | 6027.1 | unknown |
| SEQ ID N^{o} 2443 | Lin1751 | 6026.1 | unknown |
| SEQ ID N^{o} 2444 | Lin1752 | 6025.1 | unknown, similarities Staphylococcus aureus prophage phiPV83 |
| SEQ ID N^{o} 2445 | Lin1753 | 6021.1 | unknown |
| SEQ ID N^{o} 2446 | Lin1754 | 6019.1 | unknown, similar to hypothetical protein 44 - Staphylococcus aureus phage phi PVL |
| SEQ ID N^{o} 2447 | Lin1755 | 6018.1 | unknown, some similarities to phage related proteins |
| SEQ ID N^{o} 2448 | Lin1756 | 6016.1 | unknown, similar to hypothetical protein of Staphylococcus aureus phage phi PVL |
| SEQ ID N^{o} 2449 | Lin1757 | 6015.1 | unknown |
| SEQ ID N^{o} 2450 | Lin1758 | 6575.1 | Unknown |
| SEQ ID N^{o} 2451 | Lin1759 | 6012.1 | unknown |
| SEQ ID N^{o} 2452 | Lin1760 | 6009.4 | Unknown, similar to protein gp43 [Bacteriophage A118] |
| SEQ ID N^{o} 2453 | Lin1761 | 6291.1 | Unknown, similar to transcription regulator |
| SEQ ID N^{o} 2454 | Lin1762 | 5937.2 | Unknown, similar to immunity repressor protein - Bacillus phage phi-105 |
| SEQ ID N^{o} 2455 | Lin1763 | 5935.2 | Unknown, similar to ORF2 [bacteriophage phi-105] |
| SEQ ID N^{o} 2456 | Lin1764 | 5934.1 | Unknown, Listeria prophage protein |
| SEQ ID N^{o} 2457 | Lin1765 | 5933.1 | Unknown, similar to integrase |
| SEQ ID N^{o} 2458 | Lin1768 | 5926.1 | unknown, similar to Antigen C |
| SEQ ID N^{o} 2459 | Lin1811 | 5313.1 | unknown, similar to unknown proteins |
| SEQ ID N^{o} 2460 | Lin1812 | 5315.1 | Unknown, similar to excinuclease ABC (subunit A) (truncated, C-terminal end) |
| SEQ ID N^{o} 2461 | Lin1813 | 5317.1 | Unknown, similar to excinuclease ABC subunit A |
| SEQ ID N^{o} 2462 | Lin1814 | 5319.1 | unknown, similar to putative AraC-type regulators |
| SEQ ID N^{o} 2463 | Lin1898 | 4696.1 | Unknown, similar to putative NAD(P)H oxidoreductase |
| SEQ ID N^{o} 2464 | Lin1899 | 4697.1 | Unknown, similar to unknown protein |
| SEQ ID N^{o} 2465 | Lin1955 | 4817.1 | unknown |
| SEQ ID N^{o} 2466 | Lin2001 | 4896.2 | Unknown, hypothetical CDS |
| SEQ ID N^{o} 2467 | Lin2100 | 5275.3 | unknown, similar to p60-related proteins |
| SEQ ID N^{o} 2468 | Lin2210 | 6700.1 | Unknown |
| SEQ ID N^{o} 2469 | Lin2281 | 3752.1 | unknown, probable cell surface protein (LPXTG motif) |
| SEQ ID N^{o} 2470 | Lin2344 | 5982.1 | Unknown, similar to O6-methylguanine-DNA methyltransferase |
| SEQ ID N^{o} 2471 | Lin2371 | 4069.2 | Unknown, similar to competence transcription factor ComK, N terminal part |
| SEQ ID N^{o} 2472 | Lin2373 | 4899.3 | Unknown, similar to AbiD phage protein |
| SEQ ID N^{o} 2473 | Lin2374 | 4066.1 | Unknown, similar to N-acetylmuramoyl-L-alanine amidase (N-terminal part) and to L-alanoyl-D- |
| | | | glutamate peptidase (C-terminal part) |
| SEQ ID N^{o} 2474 | Lin2375 | 4065.1 | unknown, similar to phage related proteins |
| SEQ ID N^{o} 2475 | Lin2376 | 4062.1 | Unknown |
| SEQ ID N^{o} 2476 | Lin2377 | 6565.1 | Unknown |
| SEQ ID N^{o} 2477 | Lin2378 | 6199.6 | Unknown |
| SEQ ID N^{o} 2478 | Lin2379 | 6046.2 | Unknown, similar to protein gp20 [Bacteriophage A118] |
| SEQ ID N^{o} 2479 | Lin2380 | 6050.1 | Unknown, similar to protein gp19 [Bacteriophage A118] |
| SEQ ID N^{o} 2480 | Lin2381 | 6051.1 | Unknown, similar to protein R372 - Lactobacillus phage phi-gle |
| SEQ ID N^{o} 2481 | Lin2382 | 6052.1 | Unknown, similar to gp17 [Bacteriophage A118] |
| SEQ ID N^{o} 2482 | Lin2383 | 6059.1 | unknown, similar to hypothetical protein [Lactobacillus casei bacteriophage A2] |
| SEQ ID N^{o} 2483 | Lin2384 | 6063.1 | Unknown |
| SEQ ID N^{o} 2484 | Lin2385 | 6066.1 | Unknown, similar to protein gp13 [Bacteriophage A118] |
| SEQ ID N^{o} 2485 | Lin2386 | 6068.1 | Unknown |
| SEQ ID N^{o} 2486 | Lin2387 | 6070.1 | Unknown |
| SEQ ID N^{o} 2487 | Lin2388 | 6071.1 | Unknown |
| SEQ ID N^{o} 2488 | Lin2389 | 6572.1 | Unknown |
| SEQ ID N^{o} 2489 | Lin2390 | 6075.1 | Unknown, similar to main capsid protein Gp34 - Lactobacillus delbrueckii subsp. |
| | | | bulgaricus phage mv4 |
| SEQ ID N^{o} 2490 | Lin2391 | 6076.1 | Unknown |
| SEQ ID N^{o} 2491 | Lin2392 | 6078.1 | Unknown, similar to protein gp4 [Bacteriophage A118] |
| SEQ ID N^{o} 2492 | Lin2393 | 6081.1 | unknown |
| SEQ ID N^{o} 2493 | Lin2394 | 6084.1 | unknown |
| SEQ ID N^{o} 2494 | Lin2395 | 6085.1 | unknown, some similarities to phage-related terminase small subunit homolog yqaS |
| SEQ ID N^{o} 2495 | Lin2396 | 6086.1 | Unknown |
| SEQ ID N^{o} 2496 | Lin2397 | 6087.1 | unknown, similar to sigma factor-like positive control protein of B. subtilis |
| SEQ ID N^{o} 2497 | Lin2398 | 6570.1 | Unknown, hypothetical gene |
| SEQ ID N^{o} 2498 | Lin2399 | 6090.1 | unknown |
| SEQ ID N^{o} 2499 | Lin2400 | 6092.1 | Unknown, similar to Lactococcus lactis prophage pi3 protein 45 |
| SEQ ID N^{o} 2500 | Lin2401 | 6569.1 | Unknown |
| SEQ ID N^{o} 2501 | Lin2402 | 6093.1 | unknown, similar to single-stranded DNA-binding protein |
| SEQ ID N^{o} 2502 | Lin2403 | 6096.1 | unknown |
| SEQ ID N^{o} 2503 | Lin2404 | 6099.1 | unknown |
| SEQ ID N^{o} 2504 | Lin2405 | 6101.1 | unknown |
| SEQ ID N^{o} 2505 | Lin2406 | 6502.1 | Protein gp52 [Bacteriophage A118] |
| SEQ ID N^{o} 2506 | Lin2407 | 6104.2 | pseudogene |
| SEQ ID N^{o} 2507 | Lin2408 | 6698.1 | Unknown |
| SEQ ID N^{o} 2508 | Lin2409 | 3995.1 | unknown, similar to intrgase proteins |
| SEQ ID N^{o} 2509 | Lin2410 | 6131.2 | unknown, similar to phage related proteins |
| SEQ ID N^{o} 2510 | Lin2411 | 6132.1 | unknown |
| SEQ ID N^{o} 2511 | Lin2412 | 6135.1 | unknown, highly similar to gp49 [Bacteriophage A118] |
| SEQ ID N^{o} 2512 | Lin2413 | 3387.3 | unknown, highly similar to putative recombinase [Bacteriophage A118] |
| SEQ ID N^{o} 2513 | Lin2414 | 5720.2 | gp47 [Bacteriophage A118] |
| SEQ ID N^{o} 2514 | Lin2415 | 6697.1 | Unknown |
| SEQ ID N^{o} 2515 | Lin2418 | 5715.1 | Unknown, similar to anti-repressor |
| SEQ ID N^{o} 2516 | Lin2419 | 6620.2 | Unknown |
| SEQ ID N^{o} 2517 | Lin2420 | 5710.1 | Unknwon, similar to Bacteriophage A118 protein gp40 |
| SEQ ID N^{o} 2518 | Lin2421 | 5709.1 | Unknwon |
| SEQ ID N^{o} 2519 | Lin2422 | 5708.1 | Unknown, similar to Bacteriophage A118 putative repressor protein |
| SEQ ID N^{o} 2520 | Lin2423 | 5706.1 | Unknown, similar to Bacteriophage A118 protein gp34 |
| SEQ ID N^{o} 2521 | Lin2425 | 5704.1 | unknown |
| SEQ ID N^{o} 2522 | Lin2454 | 5645.1 | Unknown, similar to 6-phospho-beta-glucosidase |
| SEQ ID N^{o} 2523 | Lin2455 | 5644.1 | Unknown, similar to transcription antiterminator BgIG family |
| SEQ ID N^{o} 2524 | Lin2456 | 5643.1 | Unknown, similar to unknown proteins |
| SEQ ID N^{o} 2525 | Lin2457 | 5642.1 | Unknown, similar to PTS system, cellobiose-specific enzyme IIA component |
| SEQ ID N^{o} 2526 | Lin2458 | 5640.1 | Unknown, similar to PTS system, cellobiose-specific enzyme IIB component |
| SEQ ID N^{o} 2527 | Lin2459 | 5638.1 | Unknown, similar to PTS system, cellobiose-specific enzyme IIC component |
| SEQ ID N^{o} 2528 | Lin2487 | 5052.1 | Unknown, similar to unknown proteins |
| SEQ ID N^{o} 2529 | Lin2494 | 5039.1 | unknown, hypothetical protein |
| SEQ ID N^{o} 2530 | Lin2537 | 4955.1 | Unknown, similar to internalin proteins |
| SEQ ID N^{o} 2531 | Lin2561 | 6688.1 | Unknown, similar to unknown protein |
| SEQ ID N^{o} 2532 | Lin2562 | 4067.2 | Unknown, similar to unknown protein |
| SEQ ID N^{o} 2533 | Lin2563 | 6704.1 | Unknown, similar to N-acetylmuramoyl-L-alanine amidase (N-terminal part) and to L-alanoyl-D- |
| | | | glutamate peptidase (C-terminal part) |
| SEQ ID N^{o} 2534 | Lin2564 | 4061.3 | Unknown |
| SEQ ID N^{o} 2535 | Lin2565 | 4060.1 | Unknown, similar to protein gp20 [Bacteriophage A118] |
| SEQ ID N^{o} 2536 | Lin2566 | 4057.1 | Unknown, similar to endopeptidase [bacteriophage bIL285] |
| SEQ ID N^{o} 2537 | Lin2567 | 4054.1 | Unknown, similar to Orf53 [bacteriophage bIL285] |
| SEQ ID N^{o} 2538 | Lin2568 | 4052.1 | Unknown, similar to tail protein [bacteriophage bIL285] |
| SEQ ID N^{o} 2539 | Lin2569 | 6564.1 | Unknown, similar to Lactococcus lactis prophage pi2 protein 41 |
| SEQ ID N^{o} 2540 | Lin2570 | 4047.1 | Unknown, similar to Orf51 [bacteriophage bIL285] |
| SEQ ID N^{o} 2541 | Lin2571 | 4046.1 | Unknown, similar to Orf50 [bacteriophage bIL285] |
| SEQ ID N^{o} 2542 | Lin2572 | 4044.1 | Unknown, similar to Orf49 [bacteriophage bIL285] |
| SEQ ID N^{o} 2543 | Lin2573 | 4042.1 | Unknown, similar to Orf48 [bacteriophage bIL285] |
| SEQ ID N^{o} 2544 | Lin2574 | 4041.1 | Unknown, similar to Orf47 [bacteriophage bIL285] |
| SEQ ID N^{o} 2545 | Lin2575 | 4040.1 | Unknown, similar to Orf46 [bacteriophage bIL285] |
| SEQ ID N^{o} 2546 | Lin2576 | 4039.1 | Unknown, similar to capsid protein [bacteriophage bIL285] |
| SEQ ID N^{o} 2547 | Lin2577 | 4037.1 | Unknown, similar to protease [bacteriophage bIL285] |
| SEQ ID N^{o} 2548 | Lin2578 | 4036.1 | Unknown, similar to portal protein [bacteriophage bIL285] |
| SEQ ID N^{o} 2549 | Lin2579 | 4033.1 | Unknown, similar to terminase [bacteriophage bIL285] |
| SEQ ID N^{o} 2550 | Lin2580 | 4030.1 | Unknown, similar to bacteriophage protein |
| SEQ ID N^{o} 2551 | Lin2581 | 4028.1 | Unknown, similar to bacteriophage protein |
| SEQ ID N^{o} 2552 | Lin2582 | 4026.1 | Unknown |
| SEQ ID N^{o} 2553 | Lin2583 | 4023.1 | Unknown |
| SEQ ID N^{o} 2554 | Lin2584 | 4022.1 | Unknown |
| SEQ ID N^{o} 2555 | Lin2585 | 4021.1 | Unknown |
| SEQ ID N^{o} 2556 | Lin2586 | 4020.1 | Unknown, similar to bacteriophage protein |
| SEQ ID N^{o} 2557 | Lin2587 | 4019.1 | Unknown, similar to bacteriophage protein |
| SEQ ID N^{o} 2558 | Lin2588 | 4016.1 | Unknown, similar to bacteriophage protein |
| SEQ ID N^{o} 2559 | Lin2589 | 4015.1 | Unknown, similar to DEAH-family helicase |
| SEQ ID N^{o} 2560 | Lin2590 | 4013.1 | Unknown, similar to bacteriophage protein |
| SEQ ID N^{o} 2561 | Lin2591 | 4012.1 | Unknown, similar to bacteriophage protein |
| SEQ ID N^{o} 2562 | Lin2592 | 6696.1 | Unknown |
| SEQ ID N^{o} 2563 | Lin2593 | 4008.1 | Hypothetical gene |
| SEQ ID N^{o} 2564 | Lin2594 | 4006.1 | Unknown |
| SEQ ID N^{o} 2565 | Lin2595 | 4005.1 | Unknown |
| SEQ ID N^{o} 2566 | Lin2596 | 4003.1 | Unknown |
| SEQ ID N^{o} 2567 | Lin2597 | 4001.1 | Unknown |
| SEQ ID N^{o} 2568 | Lin2598 | 6559.1 | Unknown |
| SEQ ID N^{o} 2569 | Lin2599 | 3998.1 | Unknown |
| SEQ ID N^{o} 2570 | Lin2600 | 3996.2 | unknown |
| SEQ ID N^{o} 2571 | Lin2601 | 6130.2 | Unknown, similar to bacteriophage integrase |
| SEQ ID N^{o} 2572 | Lin2602 | 3994.2 | Unknown, similar to phage protein |
| SEQ ID N^{o} 2573 | Lin2603 | 3993.1 | unknown |
| SEQ ID N^{o} 2574 | Lin2604 | 3990.1 | unknown |
| SEQ ID N^{o} 2575 | Lin2605 | 6557.1 | Unknown |
| SEQ ID N^{o} 2576 | Lin2606 | 6556.1 | Unknown |
| SEQ ID N^{o} 2577 | Lin2607 | 3989.1 | Unknown, similar to a putative repressor protein [Bacteriophage A118] |
| SEQ ID N^{o} 2578 | Lin2608 | 3988.1 | Unknwon, similar to protein gp35 from Bacteriophage A118 |
| SEQ ID N^{o} 2579 | Lin2609 | 3987.1 | Unknown |
| SEQ ID N^{o} 2580 | Lin2610 | 3985.1 | unknown, similar to integrases |
| SEQ ID N^{o} 2581 | Lin2656 | 3889.1 | unknown, similar to late competence protein comFC |
| SEQ ID N^{o} 2582 | Lin2693 | 3815.1 | Unknown |
| SEQ ID N^{o} 2583 | Lin2703 | 5735.1 | autolysin, amidase |
| SEQ ID N^{o} 2584 | Lin2723 | 5767.1 | Unknwon, conserved hypothetical protein |
| SEQ ID N^{o} 2585 | Lin2724 | 5773.1 | unknown, internalin-like protein (LPXTG motif) |
| SEQ ID N^{o} 2586 | Lin2735 | 6183.3 | Unknown |
| SEQ ID N^{o} 2587 | Lin2736 | 6181.1 | Unknown |
| SEQ ID N^{o} 2588 | Lin2741 | 1716.1 | unknown |
| SEQ ID N^{o} 2589 | Lin2742 | 1717.1 | Unknown |
| SEQ ID N^{o} 2590 | Lin2743 | 1718.1 | unknown |
| SEQ ID N^{o} 2591 | Lin2744 | 1720.1 | unknown, similar to hypothetical proteins |
| SEQ ID N^{o} 2592 | Lin2824 | 6550.1 | Unknown, similar to hydrolase (esterase) (truncated, C-terminal end) |
| SEQ ID N^{o} 2593 | Lin2825 | 1892.1 | Unknown, similar to hydrolase (esterase) (truncated, N-terminal end) |
| SEQ ID N^{o} 2594 | Lin2839 | 1935.1 | unknown |
| SEQ ID N^{o} 2595 | Lin2918 | 2102.1 | unknown |
| SEQ ID N^{o} 2596 | Lin2921 | 6547.1 | Unknown, similar to unknown protein |
| SEQ ID N^{o} 2597 | Lin2940 | 2142.1 | unknown, similar to abortive phage resistance mechanism [Lactococcus lactis ] |
| SEQ ID N^{o} 2598 | Lin2941 | 2143.1 | unknown |
| SEQ ID N^{o} 2599 | Lin2945 | 2151.1 | unknown |
| SEQ ID N^{o} 2600 | Lin2958 | 2180.1 | Unknown, similar to efflux proteins (truncated, N-terminal end) |
| SEQ ID N^{o} 2601 | Lin2959 | 2182.1 | Unknown, similar to efflux proteins (truncated, N-terminal end) |

[0327] Table VII: Legends

[0328] SEQ ID Nos. 2602-2871: nucleotide sequences of the 270 genes specific for Listeria monocytogenes EGDe; with, in the first column, the SEQ ID identifier, in the second column the name of the gene, in the third column the IPF number (<<Pasteur Institute>> identifier No. making it possible to correlate the sequence with the sequences of Table V) and in the final column the corresponding annotation.

TABLE VII

| SEQ ID | Name | IPF ID | Function |
|---|---|---|---|
| SEQ ID N^{o} 2602 | Imo0017 | 587.1 | Unknown, similar to Bacillus anthracis CapA protein (polyglutamate capsule biosynthesis) |
| SEQ ID N^{o} 2603 | Imo0036 | 611.1 | Unknown, similar to ornithine carbamoyltransferase |
| SEQ ID N^{o} 2604 | Imo0037 | 613.1 | Unknown, similar to amino acid transporter |
| SEQ ID N^{o} 2605 | Imo0038 | 614.1 | Unknown, conserved hypothetical protein |
| SEQ ID N^{o} 2606 | Imo0039 | 615.1 | Unknown, similar to carbamate kinase |
| SEQ ID N^{o} 2607 | Imo0040 | 616.1 | Unknown, conserved hypothetical protein |
| SEQ ID N^{o} 2608 | Imo0041 | 617.1 | Unknown, conserved hypothetical protein, hypothetical regulator |
| SEQ ID N^{o} 2609 | Imo0066 | 2161.2 | Unknwon, similar to toxin components |
| SEQ ID N^{o} 2610 | Imo0067 | 395.2 | Unknown, similar to dinitrogenase reductase ADP-ribosylation system |
| SEQ ID N^{o} 2611 | Imo0069 | 392.3 | unknown |
| SEQ ID N^{o} 2612 | Imo0070 | 390.3 | unknown |
| SEQ ID N^{o} 2613 | Imo0071 | 389.1 | unknown |
| SEQ ID N^{o} 2614 | Imo0072 | 4251.1 | Unknown, Hypothetical |
| SEQ ID N^{o} 2615 | Imo0073 | 388.1 | unknown |
| SEQ ID N^{o} 2616 | Imo0074 | 387.1 | Unknown |
| SEQ ID N^{o} 2617 | Imo0079 | 380.1 | Unknown |
| SEQ ID N^{o} 2618 | Imo0080 | 379.1 | Unknown |
| SEQ ID N^{o} 2619 | Imo0081 | 378.1 | Unknown |
| SEQ ID N^{o} 2620 | Imo0082 | 377.1 | Unknown |
| SEQ ID N^{o} 2621 | Imo0083 | 376.1 | Unknown, similar to transcription regulator (merR family) |
| SEQ ID N^{o} 2622 | Imo0084 | 375.1 | Unknwon, similar to oxidoreductases |
| SEQ ID N^{o} 2623 | Imo0106 | 345.1 | Unknown, similar to transcription regulator |
| SEQ ID N^{o} 2624 | Imo0110 | 338.1 | Unknown, similar to lipase |
| SEQ ID N^{o} 2625 | Imo0140 | 2401.1 | Unknwon |
| SEQ ID N^{o} 2626 | Imo0141 | 3995.1 | unknown |
| SEQ ID N^{o} 2627 | Imo0142 | 2400.1 | unknown |
| SEQ ID N^{o} 2628 | Imo0143 | 2398.1 | unknown |
| SEQ ID N^{o} 2629 | Imo0144 | 2397.1 | Unknown |
| SEQ ID N^{o} 2630 | Imo0145 | 4247.1 | Unknwon, hypothetical protein |
| SEQ ID N^{o} 2631 | Imo0146 | 4246.1 | Unknwon, hypothetical protein |
| SEQ ID N^{o} 2632 | Imo0147 | 2395.1 | Unknown |
| SEQ ID N^{o} 2633 | Imo0148 | 2394.1 | unknown |
| SEQ ID N^{o} 2634 | Imo0149 | 2393.1 | |
| SEQ ID N^{o} 2635 | Imo0150 | 2392.1 | unknown |
| SEQ ID N^{o} 2636 | Imo0151 | 2391.1 | Unknown |
| SEQ ID N^{o} 2637 | Imo0171 | 973.1 | Unknwon, similar to internalin proteins, putative peptidoglycan bound protein (LPXTG motif) |
| SEQ ID N^{o} 2638 | Imo0172 | 970.1 | Unknown, similar to transposase C-terminal part |
| SEQ ID N^{o} 2639 | Imo0173 | 969.1 | Unknown, similar to transposase (N-terminal part) |
| SEQ ID N^{o} 2640 | Imo0174 | 968.1 | Unknown, similar to transposase |
| SEQ ID N^{o} 2641 | prfA | 1447.1 | listeriolysin positive regulatory protein |
| SEQ ID N^{o} 2642 | plcA | 1446.1 | phosphatidylinositol-specific phospholipase c |
| SEQ ID N^{o} 2643 | hly | 1445.1 | listeriolysin O precursor |
| SEQ ID N^{o} 2644 | mpl | 1444.1 | Zinc metalloproteinase precursor |
| SEQ ID N^{o} 2645 | actA | 1442.1 | actin-assembly inducing protein precursor |
| SEQ ID N^{o} 2646 | plcB | 1439.1 | phospholipase C |
| SEQ ID N^{o} 2647 | Imo0206 | 1438.1 | Unknwon |
| SEQ ID N^{o} 2648 | Imo0252 | 3976.4 | Unknown, similar to repressor (penicilinase repressor) |
| SEQ ID N^{o} 2649 | Imo0253 | 4262.2 | Unknown, similar to penicillinase antirepressor |
| SEQ ID N^{o} 2650 | Imo0254 | 1859.2 | Unknown |
| SEQ ID N^{o} 2651 | Imo0255 | 1858.1 | Unknown, similar to unknown protein |
| SEQ ID N^{o} 2652 | Imo0257 | 1856.2 | Unknown, similar to unknown protein |
| SEQ ID N^{o} 2653 | inIG | 1842.1 | internalin G |
| SEQ ID N^{o} 2654 | inIH | 1840.1 | internalin H |
| SEQ ID N^{o} 2655 | inIE | 1838.1 | internalin E |
| SEQ ID N^{o} 2656 | Imo0304 | 2474.1 | Unknown |
| SEQ ID N^{o} 2657 | Imo0310 | 3811.3 | Unknown |
| SEQ ID N^{o} 2658 | Imo0311 | 2336.3 | Unknown |
| SEQ ID N^{o} 2659 | Imo0312 | 2335.2 | Unknown, similar to unknown proteins |
| SEQ ID N^{o} 2660 | Imo0313 | 2334.1 | Unknown, conserved hypothetical protein |
| SEQ ID N^{o} 2661 | Imo0320 | 2323.1 | Unknown, similar to surface protein (peptidoglycan bound, LPXTG motif) |
| SEQ ID N^{o} 2662 | Imo0329 | 3934.1 | Unknown, similar to transposase |
| SEQ ID N^{o} 2663 | Imo0330 | 3750.2 | Unknown, similar to transposase |
| SEQ ID N^{o} 2664 | Imo0332 | 3754.2 | Unknown |
| SEQ ID N^{o} 2665 | Imo0333 | 2137.2 | Unknown, similar to internalin proteins, putative peptidoglycan bound protein (LPXTG motif) |
| SEQ ID N^{o} 2666 | Imo0334 | 2138.1 | unknown |
| SEQ ID N^{o} 2667 | Imo0337 | 2141.1 | Unknown |
| SEQ ID N^{o} 2668 | Imo0338 | 2142.1 | Unknown |
| SEQ ID N^{o} 2669 | Imo0340 | 4097.1 | Unknown |
| SEQ ID N^{o} 2670 | Imo0378 | 2050.1 | Unknown |
| SEQ ID N^{o} 2671 | Imo0379 | 2049.3 | Unknown |
| SEQ ID N^{o} 2672 | Imo0380 | 1115.3 | Unknown |
| SEQ ID N^{o} 2673 | Imo0381 | 1114.1 | Unknown |
| SEQ ID N^{o} 2674 | Imo0409 | 1074.1 | Unknown, similar to internalin, peptidoglycan bound protein (LPxTG motif) |
| SEQ ID N^{o} 2675 | Imo0419 | 1572.1 | Unknown, similar to unknown protein |
| SEQ ID N^{o} 2676 | inIA | 1549.1 | Internalin A |
| SEQ ID N^{o} 2677 | inIB | 1547.1 | Internalin B |
| SEQ ID N^{o} 2678 | Imo0438 | 1538.1 | unknown |
| SEQ ID N^{o} 2679 | Imo0440 | 1625.2 | Unknown |
| SEQ ID N^{o} 2680 | Imo0444 | 1631.1 | Unknown, conserved hypothetical protein |
| SEQ ID N^{o} 2681 | Imo0445 | 1632.1 | Unknown, similar to transcription regulator |
| SEQ ID N^{o} 2682 | Imo0446 | 1634.1 | Unknown, similar to penicillin acylase and to conjugated bile acid hydrolase |
| SEQ ID N^{o} 2683 | Imo0447 | 1635.1 | Unknown, similar to glutamate decarboxylase |
| SEQ ID N^{o} 2684 | Imo0448 | 1636.1 | Unknown, similar to amino acid antiporter |
| SEQ ID N^{o} 2685 | Imo0459 | 1655.1 | Unknown, similar to transcription regulator (VirR from Streptococcus pyogenes) |
| SEQ ID N^{o} 2686 | Imo0460 | 1656.1 | Unknown, putative membrane associated lipoprotein |
| SEQ ID N^{o} 2687 | Imo0461 | 1658.1 | Unknown |
| SEQ ID N^{o} 2688 | Imo0462 | 1659.3 | Unknown |
| SEQ ID N^{o} 2689 | Imo0463 | 1660.3 | Unknown |
| SEQ ID N^{o} 2690 | Imo0464 | 3853.2 | Unknown, weakly similar to transposase |
| SEQ ID N^{o} 2691 | Imo0465 | 3953.1 | Hypothetical orf |
| SEQ ID N^{o} 2692 | Imo0466 | 3905.2 | Unknown |
| SEQ ID N^{o} 2693 | Imo0467 | 3954.2 | Unknown |
| SEQ ID N^{o} 2694 | Imo0468 | 4040.1 | Unknown |
| SEQ ID N^{o} 2695 | Imo0469 | 3337.3 | Unknown |
| SEQ ID N^{o} 2696 | Imo0470 | 3336.3 | Unknown, weakly similar to site-specific DNA-methyltransferase |
| SEQ ID N^{o} 2697 | Imo0471 | 3335.2 | Unknown |
| SEQ ID N^{o} 2698 | Imo0472 | 3334.1 | Unknown |
| SEQ ID N^{o} 2699 | Imo0473 | 3333.1 | Unknown |
| SEQ ID N^{o} 2700 | Imo0474 | 3332.1 | Unknown |
| SEQ ID N^{o} 2701 | Imo0475 | 3331.1 | Unknown |
| SEQ ID N^{o} 2702 | Imo0476 | 3330.2 | Unknown, similar to oxetanocin A resistance protein oxrB |
| SEQ ID N^{o} 2703 | Imo0477 | 3284.1 | Unknown, putative secreted protein |
| SEQ ID N^{o} 2704 | Imo0478 | 3285.1 | Unknown, putative secreted protein |
| SEQ ID N^{o} 2705 | Imo0479 | 3286.1 | Unknown, putative secreted protein |
| SEQ ID N^{o} 2706 | Imo0492 | 1713.1 | Unknown, similar to transcriptional regulator (LysR family) |
| SEQ ID N^{o} 2707 | Imo0493 | 1714.1 | Unknown, similar to acylase |
| SEQ ID N^{o} 2708 | Imo0497 | 1718.2 | Unknown, similar to sugar transferase |
| SEQ ID N^{o} 2709 | Imo0525 | 1037.1 | Unknown |
| SEQ ID N^{o} 2710 | Imo0630 | 1518.1 | Unknown, similar to transcription antiterminator BgIG family |
| SEQ ID N^{o} 2711 | Imo0631 | 1519.1 | Unknown, similar to PTS system, fructose-specific IIA component |
| SEQ ID N^{o} 2712 | Imo0632 | 1520.1 | Unknown, similar to PTS system, fructose-specific IIC component |
| SEQ ID N^{o} 2713 | Imo0633 | 1521.1 | Unknown, similar to PTS system, fructose-specific IIB component |
| SEQ ID N^{o} 2714 | Imo0634 | 1523.1 | Unknown, similar to an E. coli putative tagatose 6-phosphate kinase |
| SEQ ID N^{o} 2715 | Imo0638 | 1528.1 | Unknown |
| SEQ ID N^{o} 2716 | Imo0726 | 4124.1 | Hypothetical CDS |
| SEQ ID N^{o} 2717 | Imo0733 | 1176.1 | Unknown, similar to transcription regulator |
| SEQ ID N^{o} 2718 | Imo0734 | 1175.1 | Unknown, similar to transcriptional regulator (Lacl family) |
| SEQ ID N^{o} 2719 | Imo0735 | 1174.1 | Unknown, similar to Ribulose-5-Phosphate 3-Epimerase |
| SEQ ID N^{o} 2720 | Imo0736 | 1173.1 | Unknown, similar to ribose 5-phosphate isomerase |
| SEQ ID N^{o} 2721 | Imo0737 | 1172.1 | Unknown |
| SEQ ID N^{o} 2722 | Imo0738 | 1171.1 | Unknown, similar to phosphotransferase system (PTS) beta-glucoside-specific enzyme IIABC componei |
| SEQ ID N^{o} 2723 | Imo0739 | 1169.1 | Unknown, similar to 6-phospho-beta-glucosidase |
| SEQ ID N^{o} 2724 | Imo0746 | 1160.1 | Unknown, hypothetical |
| SEQ ID N^{o} 2725 | Imo0747 | 1159.1 | unknown |
| SEQ ID N^{o} 2726 | Imo0748 | 1158.1 | Unknown |
| SEQ ID N^{o} 2727 | Imo0749 | 4361.1 | |
| SEQ ID N^{o} 2728 | Imo0750 | 1157.1 | Unknown |
| SEQ ID N^{o} 2729 | Imo0751 | 1156.1 | Unknown |
| SEQ ID N^{o} 2730 | Imo0752 | 1155.1 | Unknown, weakly similar to a putative haloacetate dehalogenase |
| SEQ ID N^{o} 2731 | Imo0753 | 1154.1 | unknown, similar to transcription regulator Crp/Fnr family |
| SEQ ID N^{o} 2732 | Imo0754 | 1153.2 | Unknown, weakly similar to a bile acid 7-alpha dehydratase |
| SEQ ID N^{o} 2733 | Imo0780 | 1123.1 | Unknown |
| SEQ ID N^{o} 2734 | Imo0801 | 3477.1 | Unknown, similar to internalin, putative peptidoglycan bound protein (LPXTG motif) |
| SEQ ID N^{o} 2735 | Imo0804 | 3469.2 | Unknown |
| SEQ ID N^{o} 2736 | Imo0805 | 3929.1 | unknown |
| SEQ ID N^{o} 2737 | Imo0826 | 1261.1 | Unknown, similar to transport protein |
| SEQ ID N^{o} 2738 | Imo0827 | 1259.1 | unknown, similar to transposases |
| SEQ ID N^{o} 2739 | Imo0828 | 1258.1 | unknown, similar to transposases |
| SEQ ID N^{o} 2740 | Imo0833 | 1250.1 | Unknown, similar to transcriptional regulator |
| SEQ ID N^{o} 2741 | Imo0834 | 1249.1 | unknown |
| SEQ ID N^{o} 2742 | Imo0835 | 1248.1 | Unknown, putative peptidoglycan bound protein (LPXTG motif) |
| SEQ ID N^{o} 2743 | uhpT | 1243.1 | unknown, highly similar to hexose phosphate transport protein |
| SEQ ID N^{o} 2744 | Imo0842 | 1235.1 | Unknown, putative peptidoglycan bound protein (LPXTG motif) |
| SEQ ID N^{o} 2745 | Imo0904 | 1624.2 | Unknown |
| SEQ ID N^{o} 2746 | Imo0933 | 1586.1 | unknown, similar to sugar transferase |
| SEQ ID N^{o} 2747 | Imo0940 | 1580.1 | Unknown |
| SEQ ID N^{o} 2748 | Imo1030 | 3538.3 | unknown, similar to transcriptional regulator, Lacl family |
| SEQ ID N^{o} 2749 | Imo1031 | 1398.3 | unknown, similar to hypothetical proteins |
| SEQ ID N^{o} 2750 | Imo1032 | 1396.1 | unknown, similar to transketolase |
| SEQ ID N^{o} 2751 | Imo1033 | 1394.1 | unknown, similar to transketolase |
| SEQ ID N^{o} 2752 | Imo1034 | 1392.1 | unknown, similar to glycerol kinase |
| SEQ ID N^{o} 2753 | Imo1035 | 1391.1 | unknown, similar to phosphotransferase system (PTS) beta-glucoside-specific enzyme IIABC |
| SEQ ID N^{o} 2754 | Imo1036 | 1390.1 | unknown |
| SEQ ID N^{o} 2755 | Imo1060 | 1359.1 | unknown, similar to transcription response regulator |
| SEQ ID N^{o} 2756 | Imo1061 | 1358.1 | Unknown, similar to two-component sensor histidine kinase |
| SEQ ID N^{o} 2757 | Imo1062 | 1357.1 | unknown, similar to ABC transporters (permease protein) |
| SEQ ID N^{o} 2758 | Imo1063 | 1354.1 | unknown, similar to ABC transporter (ATP binding protein) |
| SEQ ID N^{o} 2759 | Imo1076 | 3609.1 | unknown, similar to autolysin (EC 3.5.1.28) (N-acetylmuramoyl-L-alanine amidase) |
| SEQ ID N^{o} 2760 | Imo1077 | 3612.1 | unknown, similar to teichoic acid biosynthesis protein B |
| SEQ ID N^{o} 2761 | Imo1079 | 3614.3 | unknown, similar to B. subtilis YfhO protein |
| SEQ ID N^{o} 2762 | Imo1080 | 2597.3 | unknown, similar to B. subtilis minor teichoic acids biosynthesis protein GgaB |
| SEQ ID N^{o} 2763 | Imo1081 | 2598.3 | Unknown, similar to glucose-1-phosphate thymidyl transferase |
| SEQ ID N^{o} 2764 | Imo1082 | 2599.1 | Unknown, similar to dTDP-sugar epimerase |
| SEQ ID N^{o} 2765 | Imo1083 | 2600.1 | Unknown, similar to dTDP-D-glucose 4,6-dehydratase |
| SEQ ID N^{o} 2766 | Imo1084 | 2601.1 | unknown, similar to DTDP-L-rhamnose synthetase |
| SEQ ID N^{o} 2767 | Imo1085 | 2602.1 | unknown, similar to teichoic acid biosynthesis protein B |
| SEQ ID N^{o} 2768 | Imo1090 | 2608.1 | unknown, similar to glycosyltransferases |
| SEQ ID N^{o} 2769 | Imo1091 | 2609.1 | unknown, similar to glysosyltransferases |
| SEQ ID N^{o} 2770 | Imo1097 | 2618.1 | unknown, similar to integrases |
| SEQ ID N^{o} 2771 | Imo1098 | 4147.1 | unknown, highly similar to TN916 ORF8 |
| SEQ ID N^{o} 2772 | Imo1099 | 2619.1 | unknown, similar to a protein encoded by Tn916 |
| SEQ ID N^{o} 2773 | cadA | 2621.4 | cadmium resistance protein |
| SEQ ID N^{o} 2774 | Imo1101 | 3973.2 | Unknown, similar to lipoprotein signal peptidase |
| SEQ ID N^{o} 2775 | Imo1102 | 3024.1 | unknown, similar to cadmium efflux system accessory proteins |
| SEQ ID N^{o} 2776 | Imo1103 | 3023.1 | unknown, highly similar to TN916 ORF13 |
| SEQ ID N^{o} 2777 | Imo1104 | 3022.1 | unknown, highly similar to TN916 ORF14 and to L. monocytogenes P60 protein |
| SEQ ID N^{o} 2778 | Imo1105 | 3020.1 | unknown, highly similar to TN916 ORF15 |
| SEQ ID N^{o} 2779 | Imo1106 | 3018.1 | unknown, highly similar to TN916 ORF16 |
| SEQ ID N^{o} 2780 | Imo1107 | 3017.1 | unknown, highly similar to TN916 ORF17 |
| SEQ ID N^{o} 2781 | Imo1108 | 3016.1 | unknown, highly similar to TN916 ORF18 |
| SEQ ID N^{o} 2782 | Imo1109 | 4148.1 | unknown, highly similar to TN916 ORF19 |
| SEQ ID N^{o} 2783 | Imo1110 | 3014.1 | unknown, similar to unknown proteins |
| SEQ ID N^{o} 2784 | Imo1111 | 3013.1 | unknown, highly similar to TN916 ORF20 |
| SEQ ID N^{o} 2785 | Imo1112 | 3012.1 | unknown, highly similar to TN916 ORF21 |
| SEQ ID N^{o} 2786 | Imo1113 | 3011.1 | unknown, highly similar to TN916 ORF22 |
| SEQ ID N^{o} 2787 | Imo1114 | 3010.1 | unknown, highly similar to TN916 ORF23 |
| SEQ ID N^{o} 2788 | Imo1115 | 3009.3 | unknown, similar to fibrinogen-binding protein (LPXTG motif) |
| SEQ ID N^{o} 2789 | Imo1116 | 4267.1 | unknown, similar to regulatory proteins |
| SEQ ID N^{o} 2790 | Imo1117 | 4268.1 | unknown |
| SEQ ID N^{o} 2791 | Imo1118 | 4149.2 | unknown |
| SEQ ID N^{o} 2792 | Imo1119 | 247.3 | unknown, similar to methylases |
| SEQ ID N^{o} 2793 | Imo1120 | 246.1 | unknown |
| SEQ ID N^{o} 2794 | Imo1121 | 245.1 | unknown |
| SEQ ID N^{o} 2795 | Imo1125 | 241.2 | unknown |
| SEQ ID N^{o} 2796 | Imo1133 | 232.1 | unknown, similar to B. subtilis YjcS protein |
| SEQ ID N^{o} 2797 | Imo1134 | 231.1 | unknown, similar to regulatory proteins |
| SEQ ID N^{o} 2798 | Imo1135 | 230.1 | unknown |
| SEQ ID N^{o} 2799 | Imo1139 | 223.1 | unknown |
| SEQ ID N^{o} 2800 | Imo1188 | 156.1 | unknown |
| SEQ ID N^{o} 2801 | Imo1247 | 2296.1 | unknown |
| SEQ ID N^{o} 2802 | Imo1263 | 4152.2 | unknown, similar to transcriptional regulator |
| SEQ ID N^{o} 2803 | Imo1290 | 1974.3 | Unknown, similar to internalin proteins, putative peptidoglycan bound protein (LPXTG motif) |
| SEQ ID N^{o} 2804 | Imo1307 | 1997.1 | unknown |
| SEQ ID N^{o} 2805 | Imo1413 | 1778.1 | Unknown, putative peptidoglycan bound protein (LPXTG motif) |
| SEQ ID N^{o} 2806 | Imo1441 | 1814.1 | Unknown, similar to putative peptidoglycan acetylation protein |
| SEQ ID N^{o} 2807 | Imo1451 | 1827.1 | Unknown, similar to E. coli LytB protein |
| SEQ ID N^{o} 2808 | Imo1477 | 2928.1 | Unknown, similar to oxidoreductase |
| SEQ ID N^{o} 2809 | Imo1478 | 2929.1 | Unknown, similar to transcriptional regulator (MerR family) |
| SEQ ID N^{o} 2810 | Imo1597 | 3951.1 | Unknown |
| SEQ ID N^{o} 2811 | Imo1648 | 2130.1 | unknown |
| SEQ ID N^{o} 2812 | Imo1656 | 3728.1 | unknown |
| SEQ ID N^{o} 2813 | Imo1659 | 3681.2 | unknown |
| SEQ ID N^{o} 2814 | Imo1666 | 3418.2 | unknown, peptidoglycan linked protein (LPxTG) |
| SEQ ID N^{o} 2815 | Imo1714 | 3463.2 | unknown |
| SEQ ID N^{o} 2816 | inlC | 3779.3 | internalin C |
| SEQ ID N^{o} 2817 | Imo1968 | 2521.1 | unknown, similar to creatinine amidohydrolases |
| SEQ ID N^{o} 2818 | Imo1969 | 2522.1 | Unknown, similar to 2-keto-3-deoxygluconate-6-phosphate aldolase |
| SEQ ID N^{o} 2819 | Imo1970 | 2523.1 | Unknown, similar to putative phosphotriesterase related proteins |
| SEQ ID N^{o} 2820 | Imo1971 | 2524.1 | Unknown, similar to pentitol PTS system enzyme II C component |
| SEQ ID N^{o} 2821 | Imo1972 | 4065.1 | Unknown, similar to pentitol PTS system enzyme II B component |
| SEQ ID N^{o} 2822 | Imo1973 | 2527.1 | Unknown, similar to PTS system enzyme II A component |
| SEQ ID N^{o} 2823 | Imo1974 | 2528.1 | Unknown, similar to transcription regulators, (GntR family) |
| SEQ ID N^{o} 2824 | Imo2026 | 2504.1 | Unknown, putative peptidoglycan bound protein (LPXTG motif) |
| SEQ ID N^{o} 2825 | Imo2027 | 2503.1 | Unknown, putative cell surface protein, similar to internalin proteins |
| SEQ ID N^{o} 2826 | Imo2067 | 3512.1 | Unknown, similar to conjugated bile acid hydrolase |
| SEQ ID N^{o} 2827 | Imo2085 | 3691.2 | Unknown, putative peptidoglycan bound protein (LPXTG motif) |
| SEQ ID N^{o} 2828 | Imo2093 | 4359.1 | Unknown |
| SEQ ID N^{o} 2829 | Imo2143 | 858.1 | Unknown, weakly similar to mannose-6-phosphate isomerase |
| SEQ ID N^{o} 2830 | Imo2144 | 857.1 | Unknown, similar to transcription regulator GntR family |
| SEQ ID N^{o} 2831 | sepA | 842.1 | Unknown |
| SEQ ID N^{o} 2832 | Imo2197 | 3539.1 | Unknown |
| SEQ ID N^{o} 2833 | Imo2228 | 4342.1 | Unknown, similar to unknown protein |
| SEQ ID N^{o} 2834 | Imo2257 | 2761.1 | Unknown, hypothetical CDS |
| SEQ ID N^{o} 2835 | Imo2364 | 452.1 | Hypothetical protein |
| SEQ ID N^{o} 2836 | Imo2387 | 906.1 | Unknown, conserved hypothetical protein |
| SEQ ID N^{o} 2837 | Imo2395 | 4226.1 | Unknown |
| SEQ ID N^{o} 2838 | Imo2407 | 881.1 | unknown |
| SEQ ID N^{o} 2839 | Imo2408 | 4227.1 | Unknown, similar to repressor protein |
| SEQ ID N^{o} 2840 | Imo2409 | 880.1 | Unknown |
| SEQ ID N^{o} 2841 | Imo2410 | 879.1 | Unknown |
| SEQ ID N^{o} 2842 | Imo2420 | 4358.1 | unknown |
| SEQ ID N^{o} 2843 | Imo2443 | 2215.1 | unknown |
| SEQ ID N^{o} 2844 | Imo2470 | 757.1 | Unknown, similar to internalin proteins |
| SEQ ID N^{o} 2845 | Imo2576 | 3700.2 | Unknwon, peptidoglycan anchored protein (LPXTG motif) |
| SEQ ID N^{o} 2846 | Imo2594 | 1759.1 | Unknown |
| SEQ ID N^{o} 2847 | Imo2595 | 1760.1 | Unknown, similar to unknown proteins |
| SEQ ID N^{o} 2848 | Imo2671 | 49.1 | Unknown |
| SEQ ID N^{o} 2849 | Imo2672 | 51.1 | Unknown, weakly similar to transcription regulator |
| SEQ ID N^{o} 2850 | Imo2686 | 80.1 | unknown |
| SEQ ID N^{o} 2851 | Imo2732 | 270.1 | unknown |
| SEQ ID N^{o} 2852 | Imo2733 | 272.1 | Unknown, similar to PTS system, fructose-specific IIABC component |
| SEQ ID N^{o} 2853 | Imo2734 | 273.1 | Unknown, weakly similar to sugar hydrolase |
| SEQ ID N^{o} 2854 | Imo2735 | 274.1 | Unknown, similar to Sucrose phosphorylase |
| SEQ ID N^{o} 2855 | Imo2736 | 275.1 | Unknown, conserved hypothetical protein |
| SEQ ID N^{o} 2856 | Imo2771 | 710.1 | Unknown, similar to beta-glucosidase |
| SEQ ID N^{o} 2857 | Imo2772 | 711.2 | Unknown, similar to beta-glucoside-specific enzyme IIABC |
| SEQ ID N^{o} 2858 | Imo2773 | 712.2 | Unknwon, similar to transcription antiterminator |
| SEQ ID N^{o} 2859 | Imo2776 | 716.1 | Unknown |
| SEQ ID N^{o} 2860 | Imo2780 | 721.1 | Unknown, similar to cellobiose PTS enzyme IIA |
| SEQ ID N^{o} 2861 | Imo2781 | 723.1 | Unknown, similar to beta-glucosidase |
| SEQ ID N^{o} 2862 | Imo2782 | 724.1 | Unknown, similar to PTS, cellobiose-specific IIB component |
| SEQ ID N^{o} 2863 | Imo2783 | 725.1 | Unknown, similar to cellobiose phosphotransferase system enzyme IIC |
| SEQ ID N^{o} 2864 | Imo2784 | 726.1 | Unknown, similar to lichenan operon transcription antiterminator licR |
| SEQ ID N^{o} 2865 | bvrC | 728.1 | Unknown |
| SEQ ID N^{o} 2866 | bvrB | 730.1 | beta-glucoside-specific phosphotransferase enzyme II ABC component |
| SEQ ID N^{o} 2867 | bvrA | 731.2 | transcription antiterminator |
| SEQ ID N^{o} 2868 | Imo2807 | 3431.2 | Unknown, hypothetical secreted protein |
| SEQ ID N^{o} 2869 | Imo2809 | 1067.2 | Unknown, hypothetical secreted protein |
| SEQ ID N^{o} 2870 | Imo2821 | 1050.1 | Unknown, similar to internalin, Unknown, putative peptidoglycan bound protein (LPXTG motif) |
| SEQ ID N^{o} 2871 | Imo2841 | 1206.1 | unknown, weakly similar to sucrose phosphorylase |

[0329] Table VIII: Legends

[0330] SEQ ID Nos. 2872-3891: sequences of 1020 Contigs derived from the assembly of 13 919 sequences of Listeria monocytogenes 4b.

[0331] In these sequences, the undetermined bases are marked by an “N”. Some of these contigs contain the 974 former contigs of Lm4b SEQ ID Nos. 1068 to 2041; with, in the first column, the SEQ ID identifier, in the second column the contig number and the number(s) of the corresponding sequences SEQ ID Nos. 1068 to 2041 of table V.

TABLE VIII

| | |
|---|---|
| SEQ ID N^{o} 2872 | Listeria monocytogenes 4b Contig1 |
| SEQ ID N^{o} 2873 | Listeria monocytogenes 4b Contig2 |
| SEQ ID N^{o} 2874 | Listeria monocytogenes 4b Contig3 |
| SEQ ID N^{o} 2875 | Listeria monocytogenes 4b Contig4 |
| SEQ ID N^{o} 2876 | Listeria monocytogenes 4b Contig5 |
| | Corresponding to the former SEQ ID n^{o} 1069 |
| SEQ ID N^{o} 2877 | Listeria monocytogenes 4b Contig6 |
| SEQ ID N^{o} 2878 | Listeria monocytogenes 4b Contig7 |
| SEQ ID N^{o} 2879 | Listeria monocytogenes 4b Contig8 |
| | Corresponding to the former SEQ ID n^{o} 1076 |
| SEQ ID N^{o} 2880 | Listeria monocytogenes 4b Contig9 |
| SEQ ID N^{o} 2881 | Listeria monocytogenes 4b Contig10 |
| SEQ ID N^{o} 2882 | Listeria monocytogenes 4b Contig11 |
| SEQ ID N^{o} 2883 | Listeria monocytogenes 4b Contig12 |
| | Corresponding to the former SEQ ID n^{o} 1075 |
| SEQ ID N^{o} 2884 | Listeria monocytogenes 4b Contig13 |
| SEQ ID N^{o} 2885 | Listeria monocytogenes 4b Contig14 |
| SEQ ID N^{o} 2886 | Listeria monocytogenes 4b Contig15 |
| SEQ ID N^{o} 2887 | Listeria monocytogenes 4b Contig16 |
| SEQ ID N^{o} 2888 | Listeria monocytogenes 4b Contig17 |
| SEQ ID N^{o} 2889 | Listeria monocytogenes 4b Contig18 |
| SEQ ID N^{o} 2890 | Listeria monocytogenes 4b Contig19 |
| SEQ ID N^{o} 2891 | Listeria monocytogenes 4b Contig20 |
| SEQ ID N^{o} 2892 | Listeria monocytogenes 4b Contig21 |
| SEQ ID N^{o} 2893 | Listeria monocytogenes 4b Contig22 |
| SEQ ID N^{o} 2894 | Listeria monocytogenes 4b Contig23 |
| SEQ ID N^{o} 2895 | Listeria monocytogenes 4b Contig24 |
| SEQ ID N^{o} 2896 | Listeria monocytogenes 4b Contig25 |
| SEQ ID N^{o} 2897 | Listeria monocytogenes 4b Contig26 |
| SEQ ID N^{o} 2898 | Listeria monocytogenes 4b Contig27 |
| SEQ ID N^{o} 2899 | Listeria monocytogenes 4b Contig28 |
| SEQ ID N^{o} 2900 | Listeria monocytogenes 4b Contig29 |
| SEQ ID N^{o} 2901 | Listeria monocytogenes 4b Contig30 |
| SEQ ID N^{o} 2902 | Listeria monocytogenes 4b Contig31 |
| SEQ ID N^{o} 2903 | Listeria monocytogenes 4b Contig32 |
| SEQ ID N^{o} 2904 | Listeria monocytogenes 4b Contig33 |
| SEQ ID N^{o} 2905 | Listeria monocytogenes 4b Contig34 |
| SEQ ID N^{o} 2906 | Listeria monocytogenes 4b Contig35 |
| SEQ ID N^{o} 2907 | Listeria monocytogenes 4b Contig36 |
| SEQ ID N^{o} 2908 | Listeria monocytogenes 4b Contig37 |
| | Corresponding to the former SEQ ID n^{o} 1363 |
| SEQ ID N^{o} 2909 | Listeria monocytogenes 4b Contig38 |
| SEQ ID N^{o} 2910 | Listeria monocytogenes 4b Contig39 |
| SEQ ID N^{o} 2911 | Listeria monocytogenes 4b Contig40 |
| | Corresponding to the former SEQ ID n^{o} 1126 |
| SEQ ID N^{o} 2912 | Listeria monocytogenes 4b Contig41 |
| SEQ ID N^{o} 2913 | Listeria monocytogenes 4b Contig42 |
| SEQ ID N^{o} 2914 | Listeria monocytogenes 4b Contig43 |
| SEQ ID N^{o} 2915 | Listeria monocytogenes 4b Contig44 |
| | Corresponding to the former SEQ ID n^{o} 1096 |
| SEQ ID N^{o} 2916 | Listeria monocytogenes 4b Contig45 |
| SEQ ID N^{o} 2917 | Listeria monocytogenes 4b Contig46 |
| SEQ ID N^{o} 2918 | Listeria monocytogenes 4b Contig47 |
| SEQ ID N^{o} 2919 | Listeria monocytogenes 4b Contig48 |
| SEQ ID N^{o} 2920 | Listeria monocytogenes 4b Contig49 |
| SEQ ID N^{o} 2921 | Listeria monocytogenes 4b Contig50 |
| SEQ ID N^{o} 2922 | Listeria monocytogenes 4b Contig51 |
| | Corresponding to the former SEQ ID n^{o} 1145 |
| SEQ ID N^{o} 2923 | Listeria monocytogenes 4b Contig52 |
| SEQ ID N^{o} 2924 | Listeria monocytogenes 4b Contig53 |
| SEQ ID N^{o} 2925 | Listeria monocytogenes 4b Contig54 |
| SEQ ID N^{o} 2926 | Listeria monocytogenes 4b Contig55 |
| | Corresponding to the former SEQ ID n^{o} 1209 |
| SEQ ID N^{o} 2927 | Listeria monocytogenes 4b Contig56 |
| SEQ ID N^{o} 2928 | Listeria monocytogenes 4b Contig57 |
| SEQ ID N^{o} 2929 | Listeria monocytogenes 4b Contig58 |
| SEQ ID N^{o} 2930 | Listeria monocytogenes 4b Contig59 |
| | Corresponding to the former SEQ ID n^{o} 1379 |
| SEQ ID N^{o} 2931 | Listeria monocytogenes 4b Contig60 |
| SEQ ID N^{o} 2932 | Listeria monocytogenes 4b Contig61 |
| SEQ ID N^{o} 2933 | Listeria monocytogenes 4b Contig62 |
| SEQ ID N^{o} 2934 | Listeria monocytogenes 4b Contig63 |
| SEQ ID N^{o} 2935 | Listeria monocytogenes 4b Contig64 |
| | Corresponding to the former SEQ ID n^{o} 1082 |
| SEQ ID N^{o} 2936 | Listeria monocytogenes 4b Contig65 |
| SEQ ID N^{o} 2937 | Listeria monocytogenes 4b Contig66 |
| | Corresponding to the former SEQ ID n^{o} 1345 |
| SEQ ID N^{o} 2938 | Listeria monocytogenes 4b Contig67 |
| SEQ ID N^{o} 2939 | Listeria monocytogenes 4b Contig68 |
| SEQ ID N^{o} 2940 | Listeria monocytogenes 4b Contig69 |
| SEQ ID N^{o} 2941 | Listeria monocytogenes 4b Contig70 |
| | Corresponding to the former SEQ ID n^{o} 1332 |
| SEQ ID N^{o} 2942 | Listeria monocytogenes 4b Contig71 |
| SEQ ID N^{o} 2943 | Listeria monocytogenes 4b Contig72 |
| SEQ ID N^{o} 2944 | Listeria monocytogenes 4b Contig73 |
| SEQ ID N^{o} 2945 | Listeria monocytogenes 4b Contig74 |
| SEQ ID N^{o} 2946 | Listeria monocytogenes 4b Contig75 |
| SEQ ID N^{o} 2947 | Listeria monocytogenes 4b Contig76 |
| SEQ ID N^{o} 2948 | Listeria monocytogenes 4b Contig77 |
| SEQ ID N^{o} 2949 | Listeria monocytogenes 4b Contig78 |
| | Corresponding to the former SEQ ID n^{o} 1194 |
| SEQ ID N^{o} 2950 | Listeria monocytogenes 4b Contig79 |
| SEQ ID N^{o} 2951 | Listeria monocytogenes 4b Contig80 |
| SEQ ID N^{o} 2952 | Listeria monocytogenes 4b Contig81 |
| SEQ ID N^{o} 2953 | Listeria monocytogenes 4b Contig82 |
| | Corresponding to the former SEQ ID n^{o} 1161 |
| SEQ ID N^{o} 2954 | Listeria monocytogenes 4b Contig83 |
| SEQ ID N^{o} 2955 | Listeria monocytogenes 4b Contig84 |
| | Corresponding to the former SEQ ID n^{o} 1179 |
| SEQ ID N^{o} 2956 | Listeria monocytogenes 4b Contig85 |
| SEQ ID N^{o} 2957 | Listeria monocytogenes 4b Contig86 |
| SEQ ID N^{o} 2958 | Listeria monocytogenes 4b Contig87 |
| SEQ ID N^{o} 2959 | Listeria monocytogenes 4b Contig88 |
| | Corresponding to the former SEQ ID n^{o} 1100 |
| SEQ ID N^{o} 2960 | Listeria monocytogenes 4b Contig89 |
| SEQ ID N^{o} 2961 | Listeria monocytogenes 4b Contig90 |
| | Corresponding to the former SEQ ID n^{o} 1294 |
| SEQ ID N^{o} 2962 | Listeria monocytogenes 4b Contig91 |
| | Corresponding to the former SEQ ID n^{o} 1136 |
| SEQ ID N^{o} 2963 | Listeria monocytogenes 4b Contig92 |
| SEQ ID N^{o} 2964 | Listeria monocytogenes 4b Contig93 |
| SEQ ID N^{o} 2965 | Listeria monocytogenes 4b Contig94 |
| SEQ ID N^{o} 2966 | Listeria monocytogenes 4b Contig95 |
| SEQ ID N^{o} 2967 | Listeria monocytogenes 4b Contig96 |
| SEQ ID N^{o} 2968 | Listeria monocytogenes 4b Contig97 |
| SEQ ID N^{o} 2969 | Listeria monocytogenes 4b Contig98 |
| SEQ ID N^{o} 2970 | Listeria monocytogenes 4b Contig99 |
| SEQ ID N^{o} 2971 | Listeria monocytogenes 4b Contig100 |
| SEQ ID N^{o} 2972 | Listeria monocytogenes 4b Contig101 |
| SEQ ID N^{o} 2973 | Listeria monocytogenes 4b Contig102 |
| SEQ ID N^{o} 2974 | Listeria monocytogenes 4b Contig103 |
| SEQ ID N^{o} 2975 | Listeria monocytogenes 4b Contig104 |
| SEQ ID N^{o} 2976 | Listeria monocytogenes 4b Contig105 |
| SEQ ID N^{o} 2977 | Listeria monocytogenes 4b Contig106 |
| SEQ ID N^{o} 2978 | Listeria monocytogenes 4b Contig107 |
| SEQ ID N^{o} 2979 | Listeria monocytogenes 4b Contig108 |
| | Corresponding to the former SEQ ID n^{o} 1256 |
| SEQ ID N^{o} 2980 | Listeria monocytogenes 4b Contig109 |
| | Corresponding to the former SEQ ID n^{o} 1210 |
| SEQ ID N^{o} 2981 | Listeria monocytogenes 4b Contig110 |
| | Corresponding to the former SEQ ID n^{o} 1220 |
| SEQ ID N^{o} 2982 | Listeria monocytogenes 4b Contig111 |
| | Corresponding to the former SEQ ID n^{o} 1406 |
| SEQ ID N^{o} 2983 | Listeria monocytogenes 4b Contig112 |
| | Corresponding to the former SEQ ID n^{o} 1355 |
| SEQ ID N^{o} 2984 | Listeria monocytogenes 4b Contig113 |
| SEQ ID N^{o} 2985 | Listeria monocytogenes 4b Contig114 |
| SEQ ID N^{o} 2986 | Listeria monocytogenes 4b Contig115 |
| | Corresponding to the former SEQ ID n^{o} 1183 |
| SEQ ID N^{o} 2987 | Listeria monocytogenes 4b Contig116 |
| SEQ ID N^{o} 2988 | Listeria monocytogenes 4b Contig117 |
| | Corresponding to the former SEQ ID n^{o} 1235 |
| SEQ ID N^{o} 2989 | Listeria monocytogenes 4b Contig118 |
| SEQ ID N^{o} 2990 | Listeria monocytogenes 4b Contig119 |
| SEQ ID N^{o} 2991 | Listeria monocytogenes 4b Contig120 |
| SEQ ID N^{o} 2992 | Listeria monocytogenes 4b Contig121 |
| SEQ ID N^{o} 2993 | Listeria monocytogenes 4b Contig122 |
| SEQ ID N^{o} 2994 | Listeria monocytogenes 4b Contig123 |
| SEQ ID N^{o} 2995 | Listeria monocytogenes 4b Contig124 |
| | Corresponding to the former SEQ ID n^{o} 1138 |
| SEQ ID N^{o} 2996 | Listeria monocytogenes 4b Contig125 |
| SEQ ID N^{o} 2997 | Listeria monocytogenes 4b Contig126 |
| SEQ ID N^{o} 2998 | Listeria monocytogenes 4b Contig127 |
| SEQ ID N^{o} 2999 | Listeria monocytogenes 4b Contig128 |
| SEQ ID N^{o} 3000 | Listeria monocytogenes 4b Contig129 |
| | Corresponding to the former SEQ ID n^{o} 1092 |
| SEQ ID N^{o} 3001 | Listeria monocytogenes 4b Contig130 |
| | Corresponding to the former SEQ ID n^{o} 1085 |
| SEQ ID N^{o} 3002 | Listeria monocytogenes 4b Contig131 |
| | Corresponding to the former SEQ ID n^{o} 1290 |
| SEQ ID N^{o} 3003 | Listeria monocytogenes 4b Contig132 |
| SEQ ID N^{o} 3004 | Listeria monocytogenes 4b Contig133 |
| SEQ ID N^{o} 3005 | Listeria monocytogenes 4b Contig134 |
| | Corresponding to the former SEQ ID n^{o} 1108 |
| SEQ ID N^{o} 3006 | Listeria monocytogenes 4b Contig135 |
| | Corresponding to the former SEQ ID n^{o} 1417 |
| SEQ ID N^{o} 3007 | Listeria monocytogenes 4b Contig136 |
| SEQ ID N^{o} 3008 | Listeria monocytogenes 4b Contig137 |
| SEQ ID N^{o} 3009 | Listeria monocytogenes 4b Contig138 |
| SEQ ID N^{o} 3010 | Listeria monocytogenes 4b Contig139 |
| SEQ ID N^{o} 3011 | Listeria monocytogenes 4b Contig140 |
| | Corresponding to the former SEQ ID n^{o} 1098 |
| SEQ ID N^{o} 3012 | Listeria monocytogenes 4b Contig141 |
| SEQ ID N^{o} 3013 | Listeria monocytogenes 4b Contig142 |
| SEQ ID N^{o} 3014 | Listeria monocytogenes 4b Contig143 |
| SEQ ID N^{o} 3015 | Listeria monocytogenes 4b Contig144 |
| SEQ ID N^{o} 3016 | Listeria monocytogenes 4b Contig145 |
| SEQ ID N^{o} 3017 | Listeria monocytogenes 4b Contig146 |
| SEQ ID N^{o} 3018 | Listeria monocytogenes 4b Contig147 |
| SEQ ID N^{o} 3019 | Listeria monocytogenes 4b Contig148 |
| SEQ ID N^{o} 3020 | Listeria monocytogenes 4b Contig149 |
| SEQ ID N^{o} 3021 | Listeria monocytogenes 4b Contig150 |
| SEQ ID N^{o} 3022 | Listeria monocytogenes 4b Contig151 |
| | Corresponding to the former SEQ ID n^{o} 1584 |
| SEQ ID N^{o} 3023 | Listeria monocytogenes 4b Contig152 |
| | Corresponding to the former SEQ ID n^{o} 1455 |
| SEQ ID N^{o} 3024 | Listeria monocytogenes 4b Contig153 |
| SEQ ID N^{o} 3025 | Listeria monocytogenes 4b Contig154 |
| SEQ ID N^{o} 3026 | Listeria monocytogenes 4b Contig155 |
| SEQ ID N^{o} 3027 | Listeria monocytogenes 4b Contig156 |
| SEQ ID N^{o} 3028 | Listeria monocytogenes 4b Contig157 |
| | Corresponding to the former SEQ ID n^{o} 1107 |
| SEQ ID N^{o} 3029 | Listeria monocytogenes 4b Contig158 |
| SEQ ID N^{o} 3030 | Listeria monocytogenes 4b Contig159 |
| SEQ ID N^{o} 3031 | Listeria monocytogenes 4b Contig160 |
| SEQ ID N^{o} 3032 | Listeria monocytogenes 4b Contig161 |
| | Corresponding to the former SEQ ID n^{o} 1485 |
| SEQ ID N^{o} 3033 | Listeria monocytogenes 4b Contig162 |
| SEQ ID N^{o} 3034 | Listeria monocytogenes 4b Contig163 |
| SEQ ID N^{o} 3035 | Listeria monocytogenes 4b Contig164 |
| SEQ ID N^{o} 3036 | Listeria monocytogenes 4b Contig165 |
| | Corresponding to the former SEQ ID n^{o} 1538 |
| SEQ ID N^{o} 3037 | Listeria monocytogenes 4b Contig166 |
| | Corresponding to the former SEQ ID n^{o} 1409 |
| SEQ ID N^{o} 3038 | Listeria monocytogenes 4b Contig167 |
| SEQ ID N^{o} 3039 | Listeria monocytogenes 4b Contig168 |
| SEQ ID N^{o} 3040 | Listeria monocytogenes 4b Contig169 |
| SEQ ID N^{o} 3041 | Listeria monocytogenes 4b Contig170 |
| SEQ ID N^{o} 3042 | Listeria monocytogenes 4b Contig171 |
| | Corresponding to the former SEQ ID n^{o} 1246 |
| SEQ ID N^{o} 3043 | Listeria monocytogenes 4b Contig172 |
| SEQ ID N^{o} 3044 | Listeria monocytogenes 4b Contig173 |
| SEQ ID N^{o} 3045 | Listeria monocytogenes 4b Contig174 |
| SEQ ID N^{o} 3046 | Listeria monocytogenes 4b Contig175 |
| | Corresponding to the former SEQ ID n^{o} 1445 |
| SEQ ID N^{o} 3047 | Listeria monocytogenes 4b Contig176 |
| SEQ ID N^{o} 3048 | Listeria monocytogenes 4b Contig177 |
| SEQ ID N^{o} 3049 | Listeria monocytogenes 4b Contig178 |
| SEQ ID N^{o} 3050 | Listeria monocytogenes 4b Contig179 |
| | Corresponding to the former SEQ ID n^{o} 1326 |
| SEQ ID N^{o} 3051 | Listeria monocytogenes 4b Contig180 |
| | Corresponding to the former SEQ ID n^{o} 1590 |
| SEQ ID N^{o} 3052 | Listeria monocytogenes 4b Contig181 |
| SEQ ID N^{o} 3053 | Listeria monocytogenes 4b Contig182 |
| | Corresponding to the former SEQ ID n^{o} 1152 |
| SEQ ID N^{o} 3054 | Listeria monocytogenes 4b Contig183 |
| SEQ ID N^{o} 3055 | Listeria monocytogenes 4b Contig184 |
| SEQ ID N^{o} 3056 | Listeria monocytogenes 4b Contig185 |
| SEQ ID N^{o} 3057 | Listeria monocytogenes 4b Contig186 |
| | Corresponding to the former SEQ ID n^{o} 1550 |
| SEQ ID N^{o} 3058 | Listeria monocytogenes 4b Contig187 |
| SEQ ID N^{o} 3059 | Listeria monocytogenes 4b Contig188 |
| SEQ ID N^{o} 3060 | Listeria monocytogenes 4b Contig189 |
| SEQ ID N^{o} 3061 | Listeria monocytogenes 4b Contig190 |
| SEQ ID N^{o} 3062 | Listeria monocytogenes 4b Contig191 |
| SEQ ID N^{o} 3063 | Listeria monocytogenes 4b Contig192 |
| SEQ ID N^{o} 3064 | Listeria monocytogenes 4b Contig193 |
| SEQ ID N^{o} 3065 | Listeria monocytogenes 4b Contig194 |
| | Corresponding to the former SEQ ID n^{o} 1535 |
| SEQ ID N^{o} 3066 | Listeria monocytogenes 4b Contig195 |
| SEQ ID N^{o} 3067 | Listeria monocytogenes 4b Contig196 |
| | Corresponding to the former SEQ ID n^{o} 1630 |
| SEQ ID N^{o} 3068 | Listeria monocytogenes 4b Contig197 |
| SEQ ID N^{o} 3069 | Listeria monocytogenes 4b Contig198 |
| SEQ ID N^{o} 3070 | Listeria monocytogenes 4b Contig199 |
| SEQ ID N^{o} 3071 | Listeria monocytogenes 4b Contig200 |
| SEQ ID N^{o} 3072 | Listeria monocytogenes 4b Contig201 |
| SEQ ID N^{o} 3073 | Listeria monocytogenes 4b Contig202 |
| | Corresponding to the former SEQ ID n^{o} 1436 |
| SEQ ID N^{o} 3074 | Listeria monocytogenes 4b Contig203 |
| SEQ ID N^{o} 3075 | Listeria monocytogenes 4b Contig204 |
| SEQ ID N^{o} 3076 | Listeria monocytogenes 4b Contig205 |
| | Corresponding to the former SEQ ID n^{o} 1267 |
| SEQ ID N^{o} 3077 | Listeria monocytogenes 4b Contig206 |
| | Corresponding to the former SEQ ID n^{o} 1461 |
| SEQ ID N^{o} 3078 | Listeria monocytogenes 4b Contig207 |
| SEQ ID N^{o} 3079 | Listeria monocytogenes 4b Contig208 |
| | Corresponding to the former SEQ ID n^{o} 1168 |
| SEQ ID N^{o} 3080 | Listeria monocytogenes 4b Contig209 |
| SEQ ID N^{o} 3081 | Listeria monocytogenes 4b Contig210 |
| SEQ ID N^{o} 3082 | Listeria monocytogenes 4b Contig211 |
| | Corresponding to the former SEQ ID n^{o} 1159 |
| SEQ ID N^{o} 3083 | Listeria monocytogenes 4b Contig212 |
| SEQ ID N^{o} 3084 | Listeria monocytogenes 4b Contig213 |
| SEQ ID N^{o} 3085 | Listeria monocytogenes 4b Contig214 |
| SEQ ID N^{o} 3086 | Listeria monocytogenes 4b Contig215 |
| SEQ ID N^{o} 3087 | Listeria monocytogenes 4b Contig216 |
| SEQ ID N^{o} 3088 | Listeria monocytogenes 4b Contig217 |
| SEQ ID N^{o} 3089 | Listeria monocytogenes 4b Contig218 |
| | Corresponding to the former SEQ ID n^{o} 1206 |
| SEQ ID N^{o} 3090 | Listeria monocytogenes 4b Contig219 |
| | Corresponding to the former SEQ ID n^{o} 1618 |
| SEQ ID N^{o} 3091 | Listeria monocytogenes 4b Contig220 |
| | Corresponding to the former SEQ ID n^{o} 1540 |
| SEQ ID N^{o} 3092 | Listeria monocytogenes 4b Contig221 |
| | Corresponding to the former SEQ ID n^{o} 1568 |
| SEQ ID N^{o} 3093 | Listeria monocytogenes 4b Contig222 |
| | Corresponding to the former SEQ ID n^{o} 1084 |
| SEQ ID N^{o} 3094 | Listeria monocytogenes 4b Contig223 |
| SEQ ID N^{o} 3095 | Listeria monocytogenes 4b Contig224 |
| SEQ ID N^{o} 3096 | Listeria monocytogenes 4b Contig225 |
| SEQ ID N^{o} 3097 | Listeria monocytogenes 4b Contig226 |
| | Corresponding to the former SEQ ID n^{o} 1464 |
| SEQ ID N^{o} 3098 | Listeria monocytogenes 4b Contig227 |
| SEQ ID N^{o} 3099 | Listeria monocytogenes 4b Contig228 |
| SEQ ID N^{o} 3100 | Listeria monocytogenes 4b Contig229 |
| SEQ ID N^{o} 3101 | Listeria monocytogenes 4b Contig230 |
| SEQ ID N^{o} 3102 | Listeria monocytogenes 4b Contig231 |
| SEQ ID N^{o} 3103 | Listeria monocytogenes 4b Contig232 |
| | Corresponding to the former SEQ ID n^{o} 1401 |
| SEQ ID N^{o} 3104 | Listeria monocytogenes 4b Contig233 |
| SEQ ID N^{o} 3105 | Listeria monocytogenes 4b Contig234 |
| | Corresponding to the former SEQ ID n^{o} 1337 |
| SEQ ID N^{o} 3106 | Listeria monocytogenes 4b Contig235 |
| SEQ ID N^{o} 3107 | Listeria monocytogenes 4b Contig236 |
| | Corresponding to the former SEQ ID n^{o} 1471 |
| SEQ ID N^{o} 3108 | Listeria monocytogenes 4b Contig237 |
| SEQ ID N^{o} 3109 | Listeria monocytogenes 4b Contig238 |
| SEQ ID N^{o} 3110 | Listeria monocytogenes 4b Contig239 |
| SEQ ID N^{o} 3111 | Listeria monocytogenes 4b Contig240 |
| SEQ ID N^{o} 3112 | Listeria monocytogenes 4b Contig241 |
| | Corresponding to the former SEQ ID n^{o} 1621 |
| SEQ ID N^{o} 3113 | Listeria monocytogenes 4b Contig242 |
| SEQ ID N^{o} 3114 | Listeria monocytogenes 4b Contig243 |
| SEQ ID N^{o} 3115 | Listeria monocytogenes 4b Contig244 |
| SEQ ID N^{o} 3116 | Listeria monocytogenes 4b Contig245 |
| SEQ ID N^{o} 3117 | Listeria monocytogenes 4b Contig246 |
| SEQ ID N^{o} 3118 | Listeria monocytogenes 4b Contig247 |
| | Corresponding to the former SEQ ID n^{o} 1661 |
| SEQ ID N^{o} 3119 | Listeria monocytogenes 4b Contig248 |
| SEQ ID N^{o} 3120 | Listeria monocytogenes 4b Contig249 |
| SEQ ID N^{o} 3121 | Listeria monocytogenes 4b Contig250 |
| SEQ ID N^{o} 3122 | Listeria monocytogenes 4b Contig251 |
| SEQ ID N^{o} 3123 | Listeria monocytogenes 4b Contig252 |
| SEQ ID N^{o} 3124 | Listeria monocytogenes 4b Contig253 |
| SEQ ID N^{o} 3125 | Listeria monocytogenes 4b Contig254 |
| | Corresponding to the former SEQ ID n^{o} 1428 |
| SEQ ID N^{o} 3126 | Listeria monocytogenes 4b Contig255 |
| SEQ ID N^{o} 3127 | Listeria monocytogenes 4b Contig256 |
| SEQ ID N^{o} 3128 | Listeria monocytogenes 4b Contig257 |
| SEQ ID N^{o} 3129 | Listeria monocytogenes 4b Contig258 |
| | Corresponding to the former SEQ ID n^{o} 1147 |
| SEQ ID N^{o} 3130 | Listeria monocytogenes 4b Contig259 |
| SEQ ID N^{o} 3131 | Listeria monocytogenes 4b Contig260 |
| | Corresponding to the former SEQ ID n^{o} 1260 |
| SEQ ID N^{o} 3132 | Listeria monocytogenes 4b Contig261 |
| SEQ ID N^{o} 3133 | Listeria monocytogenes 4b Contig262 |
| | Corresponding to the former SEQ ID n^{o} 1465 |
| SEQ ID N^{o} 3134 | Listeria monocytogenes 4b Contig263 |
| | Corresponding to the former SEQ ID n^{o} 1131 |
| SEQ ID N^{o} 3135 | Listeria monocytogenes 4b Contig264 |
| SEQ ID N^{o} 3136 | Listeria monocytogenes 4b Contig265 |
| | Corresponding to the former SEQ ID n^{o} 1512 |
| SEQ ID N^{o} 3137 | Listeria monocytogenes 4b Contig266 |
| SEQ ID N^{o} 3138 | Listeria monocytogenes 4b Contig267 |
| SEQ ID N^{o} 3139 | Listeria monocytogenes 4b Contig268 |
| SEQ ID N^{o} 3140 | Listeria monocytogenes 4b Contig269 |
| SEQ ID N^{o} 3141 | Listeria monocytogenes 4b Contig270 |
| | Corresponding to the former SEQ ID n^{o} 1710 |
| SEQ ID N^{o} 3142 | Listeria monocytogenes 4b Contig271 |
| SEQ ID N^{o} 3143 | Listeria monocytogenes 4b Contig272 |
| | Corresponding to the former SEQ ID n^{o} 1450 |
| SEQ ID N^{o} 3144 | Listeria monocytogenes 4b Contig273 |
| | Corresponding to the former SEQ ID n^{o} 1472 |
| SEQ ID N^{o} 3145 | Listeria monocytogenes 4b Contig274 |
| | Corresponding to the former SEQ ID n^{o} 1276 |
| SEQ ID N^{o} 3146 | Listeria monocytogenes 4b Contig275 |
| SEQ ID N^{o} 3147 | Listeria monocytogenes 4b Contig276 |
| SEQ ID N^{o} 3148 | Listeria monocytogenes 4b Contig277 |
| | Corresponding to the former SEQ ID n^{o} 1524 |
| SEQ ID N^{o} 3149 | Listeria monocytogenes 4b Contig278 |
| SEQ ID N^{o} 3150 | Listeria monocytogenes 4b Contig279 |
| SEQ ID N^{o} 3151 | Listeria monocytogenes 4b Contig280 |
| | Corresponding to the former SEQ ID n^{o} 1171 |
| SEQ ID N^{o} 3152 | Listeria monocytogenes 4b Contig281 |
| | Corresponding to the former SEQ ID n^{o} 1528 |
| SEQ ID N^{o} 3153 | Listeria monocytogenes 4b Contig282 |
| SEQ ID N^{o} 3154 | Listeria monocytogenes 4b Contig283 |
| SEQ ID N^{o} 3155 | Listeria monocytogenes 4b Contig284 |
| | Corresponding to the former SEQ ID n^{o} 1570 |
| SEQ ID N^{o} 3156 | Listeria monocytogenes 4b Contig285 |
| SEQ ID N^{o} 3157 | Listeria monocytogenes 4b Contig286 |
| SEQ ID N^{o} 3158 | Listeria monocytogenes 4b Contig287 |
| | Corresponding to the former SEQ ID n^{o} 1435 |
| SEQ ID N^{o} 3159 | Listeria monocytogenes 4b Contig288 |
| SEQ ID N^{o} 3160 | Listeria monocytogenes 4b Contig289 |
| | Corresponding to the former SEQ ID n^{o} 1659 |
| SEQ ID N^{o} 3161 | Listeria monocytogenes 4b Contig290 |
| SEQ ID N^{o} 3162 | Listeria monocytogenes 4b Contig291 |
| SEQ ID N^{o} 3163 | Listeria monocytogenes 4b Contig292 |
| SEQ ID N^{o} 3164 | Listeria monocytogenes 4b Contig293 |
| SEQ ID N^{o} 3165 | Listeria monocytogenes 4b Contig294 |
| SEQ ID N^{o} 3166 | Listeria monocytogenes 4b Contig295 |
| SEQ ID N^{o} 3167 | Listeria monocytogenes 4b Contig296 |
| SEQ ID N^{o} 3168 | Listeria monocytogenes 4b Contig297 |
| | Corresponding to the former SEQ ID n^{o} 1500 |
| SEQ ID N^{o} 3169 | Listeria monocytogenes 4b Contig298 |
| SEQ ID N^{o} 3170 | Listeria monocytogenes 4b Contig299 |
| | Corresponding to the former SEQ ID n^{o} 1668 |
| SEQ ID N^{o} 3171 | Listeria monocytogenes 4b Contig300 |
| SEQ ID N^{o} 3172 | Listeria monocytogenes 4b Contig301 |
| | Corresponding to the former SEQ ID n^{o} 1091 |
| SEQ ID N^{o} 3173 | Listeria monocytogenes 4b Contig302 |
| SEQ ID N^{o} 3174 | Listeria monocytogenes 4b Contig303 |
| | Corresponding to the former SEQ ID n^{o} 1338 |
| SEQ ID N^{o} 3175 | Listeria monocytogenes 4b Contig304 |
| | Corresponding to the former SEQ ID n^{o} 1109 |
| SEQ ID N^{o} 3176 | Listeria monocytogenes 4b Contig305 |
| SEQ ID N^{o} 3177 | Listeria monocytogenes 4b Contig306 |
| SEQ ID N^{o} 3178 | Listeria monocytogenes 4b Contig307 |
| SEQ ID N^{o} 3179 | Listeria monocytogenes 4b Contig308 |
| | Corresponding to the former SEQ ID n^{o} 1380 |
| SEQ ID N^{o} 3180 | Listeria monocytogenes 4b Contig309 |
| SEQ ID N^{o} 3181 | Listeria monocytogenes 4b Contig310 |
| SEQ ID N^{o} 3182 | Listeria monocytogenes 4b Contig311 |
| SEQ ID N^{o} 3183 | Listeria monocytogenes 4b Contig312 |
| | Corresponding to the former SEQ ID n^{o} 1099 |
| SEQ ID N^{o} 3184 | Listeria monocytogenes 4b Contig313 |
| SEQ ID N^{o} 3185 | Listeria monocytogenes 4b Contig314 |
| SEQ ID N^{o} 3186 | Listeria monocytogenes 4b Contig315 |
| SEQ ID N^{o} 3187 | Listeria monocytogenes 4b Contig316 |
| SEQ ID N^{o} 3188 | Listeria monocytogenes 4b Contig317 |
| | Corresponding to the former SEQ ID n^{o} 1199 |
| SEQ ID N^{o} 3189 | Listeria monocytogenes 4b Contig318 |
| | Corresponding to the former SEQ ID n^{o} 1506 |
| SEQ ID N^{o} 3190 | Listeria monocytogenes 4b Contig319 |
| SEQ ID N^{o} 3191 | Listeria monocytogenes 4b Contig320 |
| | Corresponding to the former SEQ ID n^{o} 1239 |
| SEQ ID N^{o} 3192 | Listeria monocytogenes 4b Contig321 |
| SEQ ID N^{o} 3193 | Listeria monocytogenes 4b Contig322 |
| | Corresponding to the former SEQ ID n^{o} 1424 |
| SEQ ID N^{o} 3194 | Listeria monocytogenes 4b Contig323 |
| | Corresponding to the former SEQ ID n^{o} 1576 |
| SEQ ID N^{o} 3195 | Listeria monocytogenes 4b Contig324 |
| SEQ ID N^{o} 3196 | Listeria monocytogenes 4b Contig325 |
| | Corresponding to the former SEQ ID n^{o} 1392 |
| SEQ ID N^{o} 3197 | Listeria monocytogenes 4b Contig326 |
| | Corresponding to the former SEQ ID n^{o} 1492 |
| SEQ ID N^{o} 3198 | Listeria monocytogenes 4b Contig327 |
| SEQ ID N^{o} 3199 | Listeria monocytogenes 4b Contig328 |
| | Corresponding to the former SEQ ID n^{o} 1122 |
| SEQ ID N^{o} 3200 | Listeria monocytogenes 4b Contig329 |
| SEQ ID N^{o} 3201 | Listeria monocytogenes 4b Contig330 |
| | Corresponding to the former SEQ ID n^{o} 1231 |
| SEQ ID N^{o} 3202 | Listeria monocytogenes 4b Contig331 |
| | Corresponding to the former SEQ ID n^{o} 1583 |
| SEQ ID N^{o} 3203 | Listeria monocytogenes 4b Contig332 |
| SEQ ID N^{o} 3204 | Listeria monocytogenes 4b Contig333 |
| SEQ ID N^{o} 3205 | Listeria monocytogenes 4b Contig334 |
| | Corresponding to the former SEQ ID n^{o} 1125 |
| SEQ ID N^{o} 3206 | Listeria monocytogenes 4b Contig335 |
| SEQ ID N^{o} 3207 | Listeria monocytogenes 4b Contig336 |
| SEQ ID N^{o} 3208 | Listeria monocytogenes 4b Contig337 |
| SEQ ID N^{o} 3209 | Listeria monocytogenes 4b Contig338 |
| | Corresponding to the former SEQ ID n^{o} 1105 |
| SEQ ID N^{o} 3210 | Listeria monocytogenes 4b Contig339 |
| | Corresponding to the former SEQ ID n^{o} 1840 |
| SEQ ID N^{o} 3211 | Listeria monocytogenes 4b Contig340 |
| | Corresponding to the former SEQ ID n^{o} 1262 |
| SEQ ID N^{o} 3212 | Listeria monocytogenes 4b Contig341 |
| SEQ ID N^{o} 3213 | Listeria monocytogenes 4b Contig342 |
| SEQ ID N^{o} 3214 | Listeria monocytogenes 4b Contig343 |
| SEQ ID N^{o} 3215 | Listeria monocytogenes 4b Contig344 |
| | Corresponding to the former SEQ ID n^{o} 1662 |
| SEQ ID N^{o} 3216 | Listeria monocytogenes 4b Contig345 |
| | Corresponding to the former SEQ ID n^{o} 1215 |
| SEQ ID N^{o} 3217 | Listeria monocytogenes 4b Contig346 |
| | Corresponding to the former SEQ ID n^{o} 1350 |
| SEQ ID N^{o} 3218 | Listeria monocytogenes 4b Contig347 |
| | Corresponding to the former SEQ ID n^{o} 1101 |
| SEQ ID N^{o} 3219 | Listeria monocytogenes 4b Contig348 |
| | Corresponding to the former SEQ ID n^{o} 1162 |
| SEQ ID N^{o} 3220 | Listeria monocytogenes 4b Contig349 |
| | Corresponding to the former SEQ ID n^{o} 1251 |
| SEQ ID N^{o} 3221 | Listeria monocytogenes 4b Contig350 |
| | Corresponding to the former SEQ ID n^{o} 1696 |
| SEQ ID N^{o} 3222 | Listeria monocytogenes 4b Contig351 |
| SEQ ID N^{o} 3223 | Listeria monocytogenes 4b Contig352 |
| SEQ ID N^{o} 3224 | Listeria monocytogenes 4b Contig353 |
| SEQ ID N^{o} 3225 | Listeria monocytogenes 4b Contig354 |
| SEQ ID N^{o} 3226 | Listeria monocytogenes 4b Contig355 |
| SEQ ID N^{o} 3227 | Listeria monocytogenes 4b Contig356 |
| | Corresponding to the former SEQ ID n^{o} 1248 |
| SEQ ID N^{o} 3228 | Listeria monocytogenes 4b Contig357 |
| | Corresponding to the former SEQ ID n^{o} 1849 |
| SEQ ID N^{o} 3229 | Listeria monocytogenes 4b Contig358 |
| | Corresponding to the former SEQ ID n^{o} 1229 |
| SEQ ID N^{o} 3230 | Listeria monocytogenes 4b Contig359 |
| | Corresponding to the former SEQ ID n^{o} 1858 |
| SEQ ID N^{o} 3231 | Listeria monocytogenes 4b Contig360 |
| | Corresponding to the former SEQ ID n^{o} 1270 |
| SEQ ID N^{o} 3232 | Listeria monocytogenes 4b Contig361 |
| SEQ ID N^{o} 3233 | Listeria monocytogenes 4b Contig362 |
| | Corresponding to the former SEQ ID n^{o} 1862 |
| SEQ ID N^{o} 3234 | Listeria monocytogenes 4b Contig363 |
| | Corresponding to the former SEQ ID n^{o} 1078 |
| SEQ ID N^{o} 3235 | Listeria monocytogenes 4b Contig364 |
| | Corresponding to the former SEQ ID n^{o} 1090 |
| SEQ ID N^{o} 3236 | Listeria monocytogenes 4b Contig365 |
| SEQ ID N^{o} 3237 | Listeria monocytogenes 4b Contig366 |
| SEQ ID N^{o} 3238 | Listeria monocytogenes 4b Contig367 |
| | Corresponding to the former SEQ ID n^{o} 1115 |
| SEQ ID N^{o} 3239 | Listeria monocytogenes 4b Contig368 |
| SEQ ID N^{o} 3240 | Listeria monocytogenes 4b Contig369 |
| SEQ ID N^{o} 3241 | Listeria monocytogenes 4b Contig370 |
| | Corresponding to the former SEQ ID n^{o} 1741 |
| SEQ ID N^{o} 3242 | Listeria monocytogenes 4b Contig371 |
| | Corresponding to the former SEQ ID n^{o} 1340 |
| SEQ ID N^{o} 3243 | Listeria monocytogenes 4b Contig372 |
| | Corresponding to the former SEQ ID n^{o} 1822 |
| SEQ ID N^{o} 3244 | Listeria monocytogenes 4b Contig373 |
| SEQ ID N^{o} 3245 | Listeria monocytogenes 4b Contig374 |
| | Corresponding to the former SEQ ID n^{o} 1426 |
| SEQ ID N^{o} 3246 | Listeria monocytogenes 4b Contig375 |
| | Corresponding to the former SEQ ID n^{o} 1614 |
| SEQ ID N^{o} 3247 | Listeria monocytogenes 4b Contig376 |
| SEQ ID N^{o} 3248 | Listeria monocytogenes 4b Contig377 |
| SEQ ID N^{o} 3249 | Listeria monocytogenes 4b Contig378 |
| SEQ ID N^{o} 3250 | Listeria monocytogenes 4b Contig379 |
| SEQ ID N^{o} 3251 | Listeria monocytogenes 4b Contig380 |
| | Corresponding to the former SEQ ID n^{o} 1679 |
| SEQ ID N^{o} 3252 | Listeria monocytogenes 4b Contig381 |
| SEQ ID N^{o} 3253 | Listeria monocytogenes 4b Contig382 |
| SEQ ID N^{o} 3254 | Listeria monocytogenes 4b Contig383 |
| SEQ ID N^{o} 3255 | Listeria monocytogenes 4b Contig384 |
| SEQ ID N^{o} 3256 | Listeria monocytogenes 4b Contig385 |
| | Corresponding to the former SEQ ID n^{o} 1394 |
| SEQ ID N^{o} 3257 | Listeria monocytogenes 4b Contig386 |
| | Corresponding to the former SEQ ID n^{o} 1722 |
| SEQ ID N^{o} 3258 | Listeria monocytogenes 4b Contig387 |
| SEQ ID N^{o} 3259 | Listeria monocytogenes 4b Contig388 |
| | Corresponding to the former SEQ ID n^{o} 1609 |
| SEQ ID N^{o} 3260 | Listeria monocytogenes 4b Contig389 |
| | Corresponding to the former SEQ ID n^{o} 1777 |
| SEQ ID N^{o} 3261 | Listeria monocytogenes 4b Contig390 |
| | Corresponding to the former SEQ ID n^{o} 1396 |
| SEQ ID N^{o} 3262 | Listeria monocytogenes 4b Contig391 |
| | Corresponding to the former SEQ ID n^{o} 1546 |
| SEQ ID N^{o} 3263 | Listeria monocytogenes 4b Contig392 |
| | Corresponding to the former SEQ ID n^{o} 1438 |
| SEQ ID N^{o} 3264 | Listeria monocytogenes 4b Contig393 |
| | Corresponding to the former SEQ ID n^{o} 1440 |
| SEQ ID N^{o} 3265 | Listeria monocytogenes 4b Contig394 |
| | Corresponding to the former SEQ ID n^{o} 1582 |
| SEQ ID N^{o} 3266 | Listeria monocytogenes 4b Contig395 |
| SEQ ID N^{o} 3267 | Listeria monocytogenes 4b Contig396 |
| | Corresponding to the former SEQ ID n^{o} 1449 |
| SEQ ID N^{o} 3268 | Listeria monocytogenes 4b Contig397 |
| | Corresponding to the former SEQ ID n^{o} 1651 |
| SEQ ID N^{o} 3269 | Listeria monocytogenes 4b Contig398 |
| | Corresponding to the former SEQ ID n^{o} 1325 |
| SEQ ID N^{o} 3270 | Listeria monocytogenes 4b Contig399 |
| | Corresponding to the former SEQ ID n^{o} 1703 |
| SEQ ID N^{o} 3271 | Listeria monocytogenes 4b Contig400 |
| SEQ ID N^{o} 3272 | Listeria monocytogenes 4b Contig401 |
| | Corresponding to the former SEQ ID n^{o} 1483 |
| SEQ ID N^{o} 3273 | Listeria monocytogenes 4b Contig402 |
| SEQ ID N^{o} 3274 | Listeria monocytogenes 4b Contig403 |
| | Corresponding to the former SEQ ID n^{o} 1448 |
| SEQ ID N^{o} 3275 | Listeria monocytogenes 4b Contig404 |
| SEQ ID N^{o} 3276 | Listeria monocytogenes 4b Contig405 |
| | Corresponding to the former SEQ ID n^{o} 1653 |
| SEQ ID N^{o} 3277 | Listeria monocytogenes 4b Contig406 |
| | Corresponding to the former SEQ ID n^{o} 1725 |
| SEQ ID N^{o} 3278 | Listeria monocytogenes 4b Contig407 |
| SEQ ID N^{o} 3279 | Listeria monocytogenes 4b Contig408 |
| | Corresponding to the former SEQ ID n^{o} 1505 |
| SEQ ID N^{o} 3280 | Listeria monocytogenes 4b Contig409 |
| SEQ ID N^{o} 3281 | Listeria monocytogenes 4b Contig410 |
| | Corresponding to the former SEQ ID n^{o} 1669 |
| SEQ ID N^{o} 3282 | Listeria monocytogenes 4b Contig411 |
| SEQ ID N^{o} 3283 | Listeria monocytogenes 4b Contig412 |
| | Corresponding to the former SEQ ID n^{o} 1282 |
| SEQ ID N^{o} 3284 | Listeria monocytogenes 4b Contig413 |
| SEQ ID N^{o} 3285 | Listeria monocytogenes 4b Contig414 |
| SEQ ID N^{o} 3286 | Listeria monocytogenes 4b Contig415 |
| SEQ ID N^{o} 3287 | Listeria monocytogenes 4b Contig416 |
| | Corresponding to the former SEQ ID n^{o} 1693 |
| SEQ ID N^{o} 3288 | Listeria monocytogenes 4b Contig417 |
| | Corresponding to the former SEQ ID n^{o} 1242 |
| SEQ ID N^{o} 3289 | Listeria monocytogenes 4b Contig418 |
| | Corresponding to the former SEQ ID n^{o} 1527 |
| SEQ ID N^{o} 3290 | Listeria monocytogenes 4b Contig419 |
| | Corresponding to the former SEQ ID n^{o} 1683 |
| SEQ ID N^{o} 3291 | Listeria monocytogenes 4b Contig420 |
| | Corresponding to the former SEQ ID n^{o} 1166 |
| SEQ ID N^{o} 3292 | Listeria monocytogenes 4b Contig421 |
| SEQ ID N^{o} 3293 | Listeria monocytogenes 4b Contig422 |
| | Corresponding to the former SEQ ID n^{o} 1676 |
| SEQ ID N^{o} 3294 | Listeria monocytogenes 4b Contig423 |
| | Corresponding to the former SEQ ID n^{o} 1675 |
| SEQ ID N^{o} 3295 | Listeria monocytogenes 4b Contig424 |
| SEQ ID N^{o} 3296 | Listeria monocytogenes 4b Contig425 |
| | Corresponding to the former SEQ ID n^{o} 1299 |
| SEQ ID N^{o} 3297 | Listeria monocytogenes 4b Contig426 |
| SEQ ID N^{o} 3298 | Listeria monocytogenes 4b Contig427 |
| | Corresponding to the former SEQ ID n^{o} 1578 |
| SEQ ID N^{o} 3299 | Listeria monocytogenes 4b Contig428 |
| SEQ ID N^{o} 3300 | Listeria monocytogenes 4b Contig429 |
| | Corresponding to the former SEQ ID n^{o} 1176 |
| SEQ ID N^{o} 3301 | Listeria monocytogenes 4b Contig430 |
| SEQ ID N^{o} 3302 | Listeria monocytogenes 4b Contig431 |
| SEQ ID N^{o} 3303 | Listeria monocytogenes 4b Contig432 |
| | Corresponding to the former SEQ ID n^{o} 1263 |
| SEQ ID N^{o} 3304 | Listeria monocytogenes 4b Contig433 |
| | Corresponding to the former SEQ ID n^{o} 1637 |
| SEQ ID N^{o} 3305 | Listeria monocytogenes 4b Contig434 |
| | Corresponding to the former SEQ ID n^{o} 1665 |
| SEQ ID N^{o} 3306 | Listeria monocytogenes 4b Contig435 |
| | Corresponding to the former SEQ ID n^{o} 1243 |
| | Corresponding to the former SEQ ID n^{o} 1431 |
| SEQ ID N^{o} 3307 | Listeria monocytogenes 4b Contig436 |
| SEQ ID N^{o} 3308 | Listeria monocytogenes 4b Contig437 |
| SEQ ID N^{o} 3309 | Listeria monocytogenes 4b Contig438 |
| SEQ ID N^{o} 3310 | Listeria monocytogenes 4b Contig439 |
| | Corresponding to the former SEQ ID n^{o} 1615 |
| SEQ ID N^{o} 3311 | Listeria monocytogenes 4b Contig440 |
| | Corresponding to the former SEQ ID n^{o} 1074 |
| | Corresponding to the former SEQ ID n^{o} 1518 |
| SEQ ID N^{o} 3312 | Listeria monocytogenes 4b Contig441 |
| | Corresponding to the former SEQ ID n^{o} 1118 |
| SEQ ID N^{o} 3313 | Listeria monocytogenes 4b Contig442 |
| | Corresponding to the former SEQ ID n^{o} 1692 |
| SEQ ID N^{o} 3314 | Listeria monocytogenes 4b Contig443 |
| | Corresponding to the former SEQ ID n^{o} 1255 |
| SEQ ID N^{o} 3315 | Listeria monocytogenes 4b Contig444 |
| SEQ ID N^{o} 3316 | Listeria monocytogenes 4b Contig445 |
| | Corresponding to the former SEQ ID n^{o} 1283 |
| SEQ ID N^{o} 3317 | Listeria monocytogenes 4b Contig446 |
| | Corresponding to the former SEQ ID n^{o} 1387 |
| SEQ ID N^{o} 3318 | Listeria monocytogenes 4b Contig447 |
| SEQ ID N^{o} 3319 | Listeria monocytogenes 4b Contig448 |
| | Corresponding to the former SEQ ID n^{o} 1953 |
| SEQ ID N^{o} 3320 | Listeria monocytogenes 4b Contig449 |
| SEQ ID N^{o} 3321 | Listeria monocytogenes 4b Contig450 |
| SEQ ID N^{o} 3322 | Listeria monocytogenes 4b Contig451 |
| | Corresponding to the former SEQ ID n^{o} 1714 |
| SEQ ID N^{o} 3323 | Listeria monocytogenes 4b Contig452 |
| SEQ ID N^{o} 3324 | Listeria monocytogenes 4b Contig453 |
| SEQ ID N^{o} 3325 | Listeria monocytogenes 4b Contig454 |
| SEQ ID N^{o} 3326 | Listeria monocytogenes 4b Contig455 |
| SEQ ID N^{o} 3327 | Listeria monocytogenes 4b Contig456 |
| SEQ ID N^{o} 3328 | Listeria monocytogenes 4b Contig457 |
| SEQ ID N^{o} 3329 | Listeria monocytogenes 4b Contig458 |
| | Corresponding to the former SEQ ID n^{o} 1208 |
| SEQ ID N^{o} 3330 | Listeria monocytogenes 4b Contig459 |
| | Corresponding to the former SEQ ID n^{o} 1403 |
| SEQ ID N^{o} 3331 | Listeria monocytogenes 4b Contig460 |
| | Corresponding to the former SEQ ID n^{o} 1443 |
| | Corresponding to the former SEQ ID n^{o} 1558 |
| SEQ ID N^{o} 3332 | Listeria monocytogenes 4b Contig461 |
| | Corresponding to the former SEQ ID n^{o} 1323 |
| SEQ ID N^{o} 3333 | Listeria monocytogenes 4b Contig462 |
| | Corresponding to the former SEQ ID n^{o} 1184 |
| SEQ ID N^{o} 3334 | Listeria monocytogenes 4b Contig463 |
| SEQ ID N^{o} 3335 | Listeria monocytogenes 4b Contig464 |
| SEQ ID N^{o} 3336 | Listeria monocytogenes 4b Contig465 |
| | Corresponding to the former SEQ ID n^{o} 1274 |
| SEQ ID N^{o} 3337 | Listeria monocytogenes 4b Contig466 |
| | Corresponding to the former SEQ ID n^{o} 1815 |
| SEQ ID N^{o} 3338 | Listeria monocytogenes 4b Contig467 |
| | Corresponding to the former SEQ ID n^{o} 1607 |
| SEQ ID N^{o} 3339 | Listeria monocytogenes 4b Contig468 |
| | Corresponding to the former SEQ ID n^{o} 1573 |
| SEQ ID N^{o} 3340 | Listeria monocytogenes 4b Contig469 |
| SEQ ID N^{o} 3341 | Listeria monocytogenes 4b Contig470 |
| | Corresponding to the former SEQ ID n^{o} 1737 |
| SEQ ID N^{o} 3342 | Listeria monocytogenes 4b Contig471 |
| | Corresponding to the former SEQ ID n^{o} 1404 |
| SEQ ID N^{o} 3343 | Listeria monocytogenes 4b Contig472 |
| | Corresponding to the former SEQ ID n^{o} 1344 |
| SEQ ID N^{o} 3344 | Listeria monocytogenes 4b Contig473 |
| | Corresponding to the former SEQ ID n^{o} 1197 |
| | Corresponding to the former SEQ ID n^{o} 1490 |
| SEQ ID N^{o} 3345 | Listeria monocytogenes 4b Contig474 |
| SEQ ID N^{o} 3346 | Listeria monocytogenes 4b Contig475 |
| | Corresponding to the former SEQ ID n^{o} 1346 |
| SEQ ID N^{o} 3347 | Listeria monocytogenes 4b Contig476 |
| | Corresponding to the former SEQ ID n^{o} 1112 |
| SEQ ID N^{o} 3348 | Listeria monocytogenes 4b Contig477 |
| SEQ ID N^{o} 3349 | Listeria monocytogenes 4b Contig478 |
| SEQ ID N^{o} 3350 | Listeria monocytogenes 4b Contig479 |
| SEQ ID N^{o} 3351 | Listeria monocytogenes 4b Contig480 |
| SEQ ID N^{o} 3352 | Listeria monocytogenes 4b Contig481 |
| | Corresponding to the former SEQ ID n^{o} 1213 |
| SEQ ID N^{o} 3353 | Listeria monocytogenes 4b Contig482 |
| | Corresponding to the former SEQ ID n^{o} 1124 |
| SEQ ID N^{o} 3354 | Listeria monocytogenes 4b Contig483 |
| | Corresponding to the former SEQ ID n^{o} 1250 |
| SEQ ID N^{o} 3355 | Listeria monocytogenes 4b Contig484 |
| SEQ ID N^{o} 3356 | Listeria monocytogenes 4b Contig485 |
| | Corresponding to the former SEQ ID n^{o} 1362 |
| SEQ ID N^{o} 3357 | Listeria monocytogenes 4b Contig486 |
| | Corresponding to the former SEQ ID n^{o} 1408 |
| SEQ ID N^{o} 3358 | Listeria monocytogenes 4b Contig487 |
| SEQ ID N^{o} 3359 | Listeria monocytogenes 4b Contig488 |
| | Corresponding to the former SEQ ID n^{o} 1331 |
| SEQ ID N^{o} 3360 | Listeria monocytogenes 4b Contig489 |
| SEQ ID N^{o} 3361 | Listeria monocytogenes 4b Contig490 |
| | Corresponding to the former SEQ ID n^{o} 1596 |
| SEQ ID N^{o} 3362 | Listeria monocytogenes 4b Contig491 |
| | Corresponding to the former SEQ ID n^{o} 1537 |
| SEQ ID N^{o} 3363 | Listeria monocytogenes 4b Contig492 |
| SEQ ID N^{o} 3364 | Listeria monocytogenes 4b Contig493 |
| | Corresponding to the former SEQ ID n^{o} 1503 |
| SEQ ID N^{o} 3365 | Listeria monocytogenes 4b Contig494 |
| | Corresponding to the former SEQ ID n^{o} 1915 |
| SEQ ID N^{o} 3366 | Listeria monocytogenes 4b Contig495 |
| SEQ ID N^{o} 3367 | Listeria monocytogenes 4b Contig496 |
| SEQ ID N^{o} 3368 | Listeria monocytogenes 4b Contig497 |
| SEQ ID N^{o} 3369 | Listeria monocytogenes 4b Contig498 |
| | Corresponding to the former SEQ ID n^{o} 1476 |
| SEQ ID N^{o} 3370 | Listeria monocytogenes 4b Contig499 |
| | Corresponding to the former SEQ ID n^{o} 1871 |
| SEQ ID N^{o} 3371 | Listeria monocytogenes 4b Contig500 |
| | Corresponding to the former SEQ ID n^{o} 1071 |
| | Corresponding to the former SEQ ID n^{o} 1526 |
| SEQ ID N^{o} 3372 | Listeria monocytogenes 4b Contig501 |
| | Corresponding to the former SEQ ID n^{o} 1324 |
| SEQ ID N^{o} 3373 | Listeria monocytogenes 4b Contig502 |
| | Corresponding to the former SEQ ID n^{o} 1709 |
| SEQ ID N^{o} 3374 | Listeria monocytogenes 4b Contig503 |
| SEQ ID N^{o} 3375 | Listeria monocytogenes 4b Contig504 |
| | Corresponding to the former SEQ ID n^{o} 1172 |
| SEQ ID N^{o} 3376 | Listeria monocytogenes 4b Contig505 |
| SEQ ID N^{o} 3377 | Listeria monocytogenes 4b Contig506 |
| | Corresponding to the former SEQ ID n^{o} 1077 |
| SEQ ID N^{o} 3378 | Listeria monocytogenes 4b Contig507 |
| | Corresponding to the former SEQ ID n^{o} 1329 |
| SEQ ID N^{o} 3379 | Listeria monocytogenes 4b Contig508 |
| | Corresponding to the former SEQ ID n^{o} 1416 |
| SEQ ID N^{o} 3380 | Listeria monocytogenes 4b Contig509 |
| | Corresponding to the former SEQ ID n^{o} 1763 |
| SEQ ID N^{o} 3381 | Listeria monocytogenes 4b Contig510 |
| | Corresponding to the former SEQ ID n^{o} 1916 |
| SEQ ID N^{o} 3382 | Listeria monocytogenes 4b Contig511 |
| | Corresponding to the former SEQ ID n^{o} 1285 |
| SEQ ID N^{o} 3383 | Listeria monocytogenes 4b Contig512 |
| | Corresponding to the former SEQ ID n^{o} 1298 |
| SEQ ID N^{o} 3384 | Listeria monocytogenes 4b Contig513 |
| SEQ ID N^{o} 3385 | Listeria monocytogenes 4b Contig514 |
| | Corresponding to the former SEQ ID n^{o} 1237 |
| SEQ ID N^{o} 3386 | Listeria monocytogenes 4b Contig515 |
| SEQ ID N^{o} 3387 | Listeria monocytogenes 4b Contig516 |
| SEQ ID N^{o} 3388 | Listeria monocytogenes 4b Contig517 |
| | Corresponding to the former SEQ ID n^{o} 1658 |
| SEQ ID N^{o} 3389 | Listeria monocytogenes 4b Contig518 |
| SEQ ID N^{o} 3390 | Listeria monocytogenes 4b Contig519 |
| | Corresponding to the former SEQ ID n^{o} 1454 |
| SEQ ID N^{o} 3391 | Listeria monocytogenes 4b Contig520 |
| | Corresponding to the former SEQ ID n^{o} 1351 |
| SEQ ID N^{o} 3392 | Listeria monocytogenes 4b Contig521 |
| | Corresponding to the former SEQ ID n^{o} 1148 |
| SEQ ID N^{o} 3393 | Listeria monocytogenes 4b Contig522 |
| | Corresponding to the former SEQ ID n^{o} 1456 |
| SEQ ID N^{o} 3394 | Listeria monocytogenes 4b Contig523 |
| | Corresponding to the former SEQ ID n^{o} 1899 |
| SEQ ID N^{o} 3395 | Listeria monocytogenes 4b Contig524 |
| | Corresponding to the former SEQ ID n^{o} 1847 |
| SEQ ID N^{o} 3396 | Listeria monocytogenes 4b Contig525 |
| | Corresponding to the former SEQ ID n^{o} 1639 |
| SEQ ID N^{o} 3397 | Listeria monocytogenes 4b Contig526 |
| | Corresponding to the former SEQ ID n^{o} 1663 |
| SEQ ID N^{o} 3398 | Listeria monocytogenes 4b Contig527 |
| | Corresponding to the former SEQ ID n^{o} 1093 |
| SEQ ID N^{o} 3399 | Listeria monocytogenes 4b Contig528 |
| | Corresponding to the former SEQ ID n^{o} 1193 |
| SEQ ID N^{o} 3400 | Listeria monocytogenes 4b Contig529 |
| | Corresponding to the former SEQ ID n^{o} 1280 |
| SEQ ID N^{o} 3401 | Listeria monocytogenes 4b Contig530 |
| | Corresponding to the former SEQ ID n^{o} 1143 |
| SEQ ID N^{o} 3402 | Listeria monocytogenes 4b Contig531 |
| | Corresponding to the former SEQ ID n^{o} 1499 |
| SEQ ID N^{o} 3403 | Listeria monocytogenes 4b Contig532 |
| | Corresponding to the former SEQ ID n^{o} 1627 |
| SEQ ID N^{o} 3404 | Listeria monocytogenes 4b Contig533 |
| SEQ ID N^{o} 3405 | Listeria monocytogenes 4b Contig534 |
| SEQ ID N^{o} 3406 | Listeria monocytogenes 4b Contig535 |
| | Corresponding to the former SEQ ID n^{o} 1133 |
| SEQ ID N^{o} 3407 | Listeria monocytogenes 4b Contig536 |
| | Corresponding to the former SEQ ID n^{o} 1163 |
| SEQ ID N^{o} 3408 | Listeria monocytogenes 4b Contig537 |
| | Corresponding to the former SEQ ID n^{o} 1135 |
| SEQ ID N^{o} 3409 | Listeria monocytogenes 4b Contig538 |
| SEQ ID N^{o} 3410 | Listeria monocytogenes 4b Contig539 |
| | Corresponding to the former SEQ ID n^{o} 1838 |
| SEQ ID N^{o} 3411 | Listeria monocytogenes 4b Contig540 |
| | Corresponding to the former SEQ ID n^{o} 1217 |
| SEQ ID N^{o} 3412 | Listeria monocytogenes 4b Contig541 |
| | Corresponding to the former SEQ ID n^{o} 1297 |
| SEQ ID N^{o} 3413 | Listeria monocytogenes 4b Contig542 |
| SEQ ID N^{o} 3414 | Listeria monocytogenes 4b Contig543 |
| | Corresponding to the former SEQ ID n^{o} 1765 |
| SEQ ID N^{o} 3415 | Listeria monocytogenes 4b Contig544 |
| | Corresponding to the former SEQ ID n^{o} 1228 |
| SEQ ID N^{o} 3416 | Listeria monocytogenes 4b Contig545 |
| | Corresponding to the former SEQ ID n^{o} 1638 |
| SEQ ID N^{o} 3417 | Listeria monocytogenes 4b Contig546 |
| | Corresponding to the former SEQ ID n^{o} 1965 |
| SEQ ID N^{o} 3418 | Listeria monocytogenes 4b Contig547 |
| | Corresponding to the former SEQ ID n^{o} 1211 |
| SEQ ID N^{o} 3419 | Listeria monocytogenes 4b Contig548 |
| | Corresponding to the former SEQ ID n^{o} 1327 |
| SEQ ID N^{o} 3420 | Listeria monocytogenes 4b Contig549 |
| | Corresponding to the former SEQ ID n^{o} 1502 |
| SEQ ID N^{o} 3421 | Listeria monocytogenes 4b Contig550 |
| | Corresponding to the former SEQ ID n^{o} 1252 |
| SEQ ID N^{o} 3422 | Listeria monocytogenes 4b Contig551 |
| | Corresponding to the former SEQ ID n^{o} 1721 |
| SEQ ID N^{o} 3423 | Listeria monocytogenes 4b Contig552 |
| | Corresponding to the former SEQ ID n^{o} 1349 |
| | Corresponding to the former SEQ ID n^{o} 1728 |
| SEQ ID N^{o} 3424 | Listeria monocytogenes 4b Contig553 |
| | Corresponding to the former SEQ ID n^{o} 1691 |
| SEQ ID N^{o} 3425 | Listeria monocytogenes 4b Contig554 |
| | Corresponding to the former SEQ ID n^{o} 1227 |
| | Corresponding to the former SEQ ID n^{o} 1399 |
| SEQ ID N^{o} 3426 | Listeria monocytogenes 4b Contig555 |
| | Corresponding to the former SEQ ID n^{o} 1555 |
| SEQ ID N^{o} 3427 | Listeria monocytogenes 4b Contig556 |
| SEQ ID N^{o} 3428 | Listeria monocytogenes 4b Contig557 |
| | Corresponding to the former SEQ ID n^{o} 1114 |
| | Corresponding to the former SEQ ID n^{o} 1366 |
| SEQ ID N^{o} 3429 | Listeria monocytogenes 4b Contig558 |
| SEQ ID N^{o} 3430 | Listeria monocytogenes 4b Contig559 |
| | Corresponding to the former SEQ ID n^{o} 1805 |
| SEQ ID N^{o} 3431 | Listeria monocytogenes 4b Contig560 |
| | Corresponding to the former SEQ ID n^{o} 1852 |
| SEQ ID N^{o} 3432 | Listeria monocytogenes 4b Contig561 |
| SEQ ID N^{o} 3433 | Listeria monocytogenes 4b Contig562 |
| | Corresponding to the former SEQ ID n^{o} 1923 |
| SEQ ID N^{o} 3434 | Listeria monocytogenes 4b Contig563 |
| | Corresponding to the former SEQ ID n^{o} 1395 |
| SEQ ID N^{o} 3435 | Listeria monocytogenes 4b Contig564 |
| | Corresponding to the former SEQ ID n^{o} 1561 |
| SEQ ID N^{o} 3436 | Listeria monocytogenes 4b Contig565 |
| SEQ ID N^{o} 3437 | Listeria monocytogenes 4b Contig566 |
| | Corresponding to the former SEQ ID n^{o} 1643 |
| SEQ ID N^{o} 3438 | Listeria monocytogenes 4b Contig567 |
| | Corresponding to the former SEQ ID n^{o} 1820 |
| SEQ ID N^{o} 3439 | Listeria monocytogenes 4b Contig568 |
| | Corresponding to the former SEQ ID n^{o} 1177 |
| SEQ ID N^{o} 3440 | Listeria monocytogenes 4b Contig569 |
| SEQ ID N^{o} 3441 | Listeria monocytogenes 4b Contig570 |
| | Corresponding to the former SEQ ID n^{o} 1501 |
| SEQ ID N^{o} 3442 | Listeria monocytogenes 4b Contig571 |
| | Corresponding to the former SEQ ID n^{o} 1195 |
| SEQ ID N^{o} 3443 | Listeria monocytogenes 4b Contig572 |
| | Corresponding to the former SEQ ID n^{o} 1556 |
| SEQ ID N^{o} 3444 | Listeria monocytogenes 4b Contig573 |
| SEQ ID N^{o} 3445 | Listeria monocytogenes 4b Contig574 |
| | Corresponding to the former SEQ ID n^{o} 1888 |
| SEQ ID N^{o} 3446 | Listeria monocytogenes 4b Contig575 |
| | Corresponding to the former SEQ ID n^{o} 1730 |
| SEQ ID N^{o} 3447 | Listeria monocytogenes 4b Contig576 |
| | Corresponding to the former SEQ ID n^{o} 1629 |
| SEQ ID N^{o} 3448 | Listeria monocytogenes 4b Contig577 |
| | Corresponding to the former SEQ ID n^{o} 1688 |
| SEQ ID N^{o} 3449 | Listeria monocytogenes 4b Contig578 |
| | Corresponding to the former SEQ ID n^{o} 1549 |
| SEQ ID N^{o} 3450 | Listeria monocytogenes 4b Contig579 |
| | Corresponding to the former SEQ ID n^{o} 1673 |
| SEQ ID N^{o} 3451 | Listeria monocytogenes 4b Contig580 |
| | Corresponding to the former SEQ ID n^{o} 1273 |
| SEQ ID N^{o} 3452 | Listeria monocytogenes 4b Contig581 |
| | Corresponding to the former SEQ ID n^{o} 1415 |
| SEQ ID N^{o} 3453 | Listeria monocytogenes 4b Contig582 |
| SEQ ID N^{o} 3454 | Listeria monocytogenes 4b Contig583 |
| | Corresponding to the former SEQ ID n^{o} 1281 |
| SEQ ID N^{o} 3455 | Listeria monocytogenes 4b Contig584 |
| | Corresponding to the former SEQ ID n^{o} 1572 |
| SEQ ID N^{o} 3456 | Listeria monocytogenes 4b Contig585 |
| SEQ ID N^{o} 3457 | Listeria monocytogenes 4b Contig586 |
| | Corresponding to the former SEQ ID n^{o} 1949 |
| SEQ ID N^{o} 3458 | Listeria monocytogenes 4b Contig587 |
| | Corresponding to the former SEQ ID n^{o} 1625 |
| SEQ ID N^{o} 3459 | Listeria monocytogenes 4b Contig588 |
| SEQ ID N^{o} 3460 | Listeria monocytogenes 4b Contig589 |
| | Corresponding to the former SEQ ID n^{o} 1622 |
| SEQ ID N^{o} 3461 | Listeria monocytogenes 4b Contig590 |
| | Corresponding to the former SEQ ID n^{o} 1086 |
| SEQ ID N^{o} 3462 | Listeria monocytogenes 4b Contig591 |
| | Corresponding to the former SEQ ID n^{o} 1781 |
| SEQ ID N^{o} 3463 | Listeria monocytogenes 4b Contig592 |
| | Corresponding to the former SEQ ID n^{o} 1304 |
| SEQ ID N^{o} 3464 | Listeria monocytogenes 4b Contig593 |
| | Corresponding to the former SEQ ID n^{o} 1489 |
| SEQ ID N^{o} 3465 | Listeria monocytogenes 4b Contig594 |
| | Corresponding to the former SEQ ID n^{o} 1770 |
| SEQ ID N^{o} 3466 | Listeria monocytogenes 4b Contig595 |
| | Corresponding to the former SEQ ID n^{o} 1377 |
| | Corresponding to the former SEQ ID n^{o} 1689 |
| SEQ ID N^{o} 3467 | Listeria monocytogenes 4b Contig596 |
| | Corresponding to the former SEQ ID n^{o} 1225 |
| | Corresponding to the former SEQ ID n^{o} 1759 |
| SEQ ID N^{o} 3468 | Listeria monocytogenes 4b Contig597 |
| SEQ ID N^{o} 3469 | Listeria monocytogenes 4b Contig598 |
| SEQ ID N^{o} 3470 | Listeria monocytogenes 4b Contig599 |
| | Corresponding to the former SEQ ID n^{o} 1477 |
| SEQ ID N^{o} 3471 | Listeria monocytogenes 4b Contig600 |
| | Corresponding to the former SEQ ID n^{o} 1903 |
| SEQ ID N^{o} 3472 | Listeria monocytogenes 4b Contig601 |
| | Corresponding to the former SEQ ID n^{o} 1961 |
| SEQ ID N^{o} 3473 | Listeria monocytogenes 4b Contig602 |
| | Corresponding to the former SEQ ID n^{o} 1754 |
| SEQ ID N^{o} 3474 | Listeria monocytogenes 4b Contig603 |
| | Corresponding to the former SEQ ID n^{o} 1188 |
| SEQ ID N^{o} 3475 | Listeria monocytogenes 4b Contig604 |
| SEQ ID N^{o} 3476 | Listeria monocytogenes 4b Contig605 |
| | Corresponding to the former SEQ ID n^{o} 1913 |
| SEQ ID N^{o} 3477 | Listeria monocytogenes 4b Contig606 |
| SEQ ID N^{o} 3478 | Listeria monocytogenes 4b Contig607 |
| SEQ ID N^{o} 3479 | Listeria monocytogenes 4b Contig608 |
| | Corresponding to the former SEQ ID n^{o} 1439 |
| | Corresponding to the former SEQ ID n^{o} 1545 |
| SEQ ID N^{o} 3480 | Listeria monocytogenes 4b Contig609 |
| | Corresponding to the former SEQ ID n^{o} 1794 |
| SEQ ID N^{o} 3481 | Listeria monocytogenes 4b Contig610 |
| | Corresponding to the former SEQ ID n^{o} 1798 |
| SEQ ID N^{o} 3482 | Listeria monocytogenes 4b Contig611 |
| | Corresponding to the former SEQ ID n^{o} 1200 |
| SEQ ID N^{o} 3483 | Listeria monocytogenes 4b Contig612 |
| | Corresponding to the former SEQ ID n^{o} 1808 |
| SEQ ID N^{o} 3484 | Listeria monocytogenes 4b Contig613 |
| | Corresponding to the former SEQ ID n^{o} 1894 |
| SEQ ID N^{o} 3485 | Listeria monocytogenes 4b Contig614 |
| | Corresponding to the former SEQ ID n^{o} 1812 |
| SEQ ID N^{o} 3486 | Listeria monocytogenes 4b Contig615 |
| | Corresponding to the former SEQ ID n^{o} 1205 |
| SEQ ID N^{o} 3487 | Listeria monocytogenes 4b Contig616 |
| SEQ ID N^{o} 3488 | Listeria monocytogenes 4b Contig617 |
| SEQ ID N^{o} 3489 | Listeria monocytogenes 4b Contig618 |
| | Corresponding to the former SEQ ID n^{o} 1352 |
| SEQ ID N^{o} 3490 | Listeria monocytogenes 4b Contig619 |
| | Corresponding to the former SEQ ID n^{o} 1142 |
| | Corresponding to the former SEQ ID n^{o} 1601 |
| SEQ ID N^{o} 3491 | Listeria monocytogenes 4b Contig620 |
| | Corresponding to the former SEQ ID n^{o} 1575 |
| SEQ ID N^{o} 3492 | Listeria monocytogenes 4b Contig621 |
| | Corresponding to the former SEQ ID n^{o} 1670 |
| SEQ ID N^{o} 3493 | Listeria monocytogenes 4b Contig622 |
| | Corresponding to the former SEQ ID n^{o} 1890 |
| SEQ ID N^{o} 3494 | Listeria monocytogenes 4b Contig623 |
| | Corresponding to the former SEQ ID n^{o} 1333 |
| SEQ ID N^{o} 3495 | Listeria monocytogenes 4b Contig624 |
| | Corresponding to the former SEQ ID n^{o} 1789 |
| SEQ ID N^{o} 3496 | Listeria monocytogenes 4b Contig625 |
| | Corresponding to the former SEQ ID n^{o} 1508 |
| SEQ ID N^{o} 3497 | Listeria monocytogenes 4b Contig626 |
| SEQ ID N^{o} 3498 | Listeria monocytogenes 4b Contig627 |
| | Corresponding to the former SEQ ID n^{o} 1775 |
| SEQ ID N^{o} 3499 | Listeria monocytogenes 4b Contig628 |
| | Corresponding to the former SEQ ID n^{o} 1391 |
| SEQ ID N^{o} 3500 | Listeria monocytogenes 4b Contig629 |
| | Corresponding to the former SEQ ID n^{o} 1657 |
| SEQ ID N^{o} 3501 | Listeria monocytogenes 4b Contig630 |
| | Corresponding to the former SEQ ID n^{o} 1851 |
| SEQ ID N^{o} 3502 | Listeria monocytogenes 4b Contig631 |
| SEQ ID N^{o} 3503 | Listeria monocytogenes 4b Contig632 |
| | Corresponding to the former SEQ ID n^{o} 1711 |
| SEQ ID N^{o} 3504 | Listeria monocytogenes 4b Contig633 |
| | Corresponding to the former SEQ ID n^{o} 1169 |
| SEQ ID N^{o} 3505 | Listeria monocytogenes 4b Contig634 |
| | Corresponding to the former SEQ ID n^{o} 1660 |
| SEQ ID N^{o} 3506 | Listeria monocytogenes 4b Contig635 |
| SEQ ID N^{o} 3507 | Listeria monocytogenes 4b Contig636 |
| SEQ ID N^{o} 3508 | Listeria monocytogenes 4b Contig637 |
| | Corresponding to the former SEQ ID n^{o} 1767 |
| SEQ ID N^{o} 3509 | Listeria monocytogenes 4b Contig638 |
| SEQ ID N^{o} 3510 | Listeria monocytogenes 4b Contig639 |
| SEQ ID N^{o} 3511 | Listeria monocytogenes 4b Contig640 |
| | Corresponding to the former SEQ ID n^{o} 1992 |
| SEQ ID N^{o} 3512 | Listeria monocytogenes 4b Contig641 |
| | Corresponding to the former SEQ ID n^{o} 1413 |
| | Corresponding to the former SEQ ID n^{o} 1515 |
| SEQ ID N^{o} 3513 | Listeria monocytogenes 4b Contig642 |
| | Corresponding to the former SEQ ID n^{o} 1140 |
| | Corresponding to the former SEQ ID n^{o} 1373 |
| SEQ ID N^{o} 3514 | Listeria monocytogenes 4b Contig643 |
| | Corresponding to the former SEQ ID n^{o} 1498 |
| SEQ ID N^{o} 3515 | Listeria monocytogenes 4b Contig644 |
| SEQ ID N^{o} 3516 | Listeria monocytogenes 4b Contig645 |
| SEQ ID N^{o} 3517 | Listeria monocytogenes 4b Contig646 |
| | Corresponding to the former SEQ ID n^{o} 1496 |
| SEQ ID N^{o} 3518 | Listeria monocytogenes 4b Contig647 |
| | Corresponding to the former SEQ ID n^{o} 1934 |
| SEQ ID N^{o} 3519 | Listeria monocytogenes 4b Contig648 |
| | Corresponding to the former SEQ ID n^{o} 1650 |
| SEQ ID N^{o} 3520 | Listeria monocytogenes 4b Contig649 |
| | Corresponding to the former SEQ ID n^{o} 1233 |
| | Corresponding to the former SEQ ID n^{o} 1671 |
| SEQ ID N^{o} 3521 | Listeria monocytogenes 4b Contig650 |
| | Corresponding to the former SEQ ID n^{o} 1950 |
| SEQ ID N^{o} 3522 | Listeria monocytogenes 4b Contig651 |
| | Corresponding to the former SEQ ID n^{o} 1889 |
| SEQ ID N^{o} 3523 | Listeria monocytogenes 4b Contig652 |
| | Corresponding to the former SEQ ID n^{o} 1922 |
| SEQ ID N^{o} 3524 | Listeria monocytogenes 4b Contig653 |
| | Corresponding to the former SEQ ID n^{o} 1313 |
| | Corresponding to the former SEQ ID n^{o} 1453 |
| SEQ ID N^{o} 3525 | Listeria monocytogenes 4b Contig654 |
| | Corresponding to the former SEQ ID n^{o} 1185 |
| SEQ ID N^{o} 3526 | Listeria monocytogenes 4b Contig655 |
| | Corresponding to the former SEQ ID n^{o} 1562 |
| SEQ ID N^{o} 3527 | Listeria monocytogenes 4b Contig656 |
| SEQ ID N^{o} 3528 | Listeria monocytogenes 4b Contig657 |
| SEQ ID N^{o} 3529 | Listeria monocytogenes 4b Contig658 |
| SEQ ID N^{o} 3530 | Listeria monocytogenes 4b Contig659 |
| | Corresponding to the former SEQ ID n^{o} 1348 |
| SEQ ID N^{o} 3531 | Listeria monocytogenes 4b Contig660 |
| | Corresponding to the former SEQ ID n^{o} 1293 |
| SEQ ID N^{o} 3532 | Listeria monocytogenes 4b Contig661 |
| | Corresponding to the former SEQ ID n^{o} 1165 |
| | Corresponding to the former SEQ ID n^{o} 1762 |
| SEQ ID N^{o} 3533 | Listeria monocytogenes 4b Contig662 |
| | Corresponding to the former SEQ ID n^{o} 1640 |
| SEQ ID N^{o} 3534 | Listeria monocytogenes 4b Contig663 |
| SEQ ID N^{o} 3535 | Listeria monocytogenes 4b Contig664 |
| SEQ ID N^{o} 3536 | Listeria monocytogenes 4b Contig665 |
| | Corresponding to the former SEQ ID n^{o} 1764 |
| SEQ ID N^{o} 3537 | Listeria monocytogenes 4b Contig666 |
| | Corresponding to the former SEQ ID n^{o} 1543 |
| SEQ ID N^{o} 3538 | Listeria monocytogenes 4b Contig667 |
| | Corresponding to the former SEQ ID n^{o} 1844 |
| SEQ ID N^{o} 3539 | Listeria monocytogenes 4b Contig668 |
| | Corresponding to the former SEQ ID n^{o} 1560 |
| SEQ ID N^{o} 3540 | Listeria monocytogenes 4b Contig669 |
| | Corresponding to the former SEQ ID n^{o} 1744 |
| SEQ ID N^{o} 3541 | Listeria monocytogenes 4b Contig670 |
| | Corresponding to the former SEQ ID n^{o} 1796 |
| SEQ ID N^{o} 3542 | Listeria monocytogenes 4b Contig671 |
| | Corresponding to the former SEQ ID n^{o} 1776 |
| SEQ ID N^{o} 3543 | Listeria monocytogenes 4b Contig672 |
| | Corresponding to the former SEQ ID n^{o} 1897 |
| SEQ ID N^{o} 3544 | Listeria monocytogenes 4b Contig673 |
| | Corresponding to the former SEQ ID n^{o} 1704 |
| SEQ ID N^{o} 3545 | Listeria monocytogenes 4b Contig674 |
| | Corresponding to the former SEQ ID n^{o} 1713 |
| SEQ ID N^{o} 3546 | Listeria monocytogenes 4b Contig675 |
| | Corresponding to the former SEQ ID n^{o} 1295 |
| | Corresponding to the former SEQ ID n^{o} 1353 |
| SEQ ID N^{o} 3547 | Listeria monocytogenes 4b Contig676 |
| | Corresponding to the former SEQ ID n^{o} 1303 |
| SEQ ID N^{o} 3548 | Listeria monocytogenes 4b Contig677 |
| SEQ ID N^{o} 3549 | Listeria monocytogenes 4b Contig678 |
| SEQ ID N^{o} 3550 | Listeria monocytogenes 4b Contig679 |
| SEQ ID N^{o} 3551 | Listeria monocytogenes 4b Contig680 |
| SEQ ID N^{o} 3552 | Listeria monocytogenes 4b Contig681 |
| | Corresponding to the former SEQ ID n^{o} 1212 |
| | Corresponding to the former SEQ ID n^{o} 1521 |
| SEQ ID N^{o} 3553 | Listeria monocytogenes 4b Contig682 |
| SEQ ID N^{o} 3554 | Listeria monocytogenes 4b Contig683 |
| | Corresponding to the former SEQ ID n^{o} 1694 |
| SEQ ID N^{o} 3555 | Listeria monocytogenes 4b Contig684 |
| | Corresponding to the former SEQ ID n^{o} 1939 |
| SEQ ID N^{o} 3556 | Listeria monocytogenes 4b Contig685 |
| | Corresponding to the former SEQ ID n^{o} 1717 |
| SEQ ID N^{o} 3557 | Listeria monocytogenes 4b Contig686 |
| | Corresponding to the former SEQ ID n^{o} 1626 |
| SEQ ID N^{o} 3558 | Listeria monocytogenes 4b Contig687 |
| | Corresponding to the former SEQ ID n^{o} 1585 |
| SEQ ID N^{o} 3559 | Listeria monocytogenes 4b Contig688 |
| | Corresponding to the former SEQ ID n^{o} 1491 |
| SEQ ID N^{o} 3560 | Listeria monocytogenes 4b Contig689 |
| | Corresponding to the former SEQ ID n^{o} 1314 |
| | Corresponding to the former SEQ ID n^{o} 1481 |
| SEQ ID N^{o} 3561 | Listeria monocytogenes 4b Contig690 |
| | Corresponding to the former SEQ ID n^{o} 1155 |
| SEQ ID N^{o} 3562 | Listeria monocytogenes 4b Contig691 |
| | Corresponding to the former SEQ ID n^{o} 1149 |
| | Corresponding to the former SEQ ID n^{o} 1747 |
| SEQ ID N^{o} 3563 | Listeria monocytogenes 4b Contig692 |
| | Corresponding to the former SEQ ID n^{o} 1364 |
| SEQ ID N^{o} 3564 | Listeria monocytogenes 4b Contig693 |
| | Corresponding to the former SEQ ID n^{o} 1594 |
| SEQ ID N^{o} 3565 | Listeria monocytogenes 4b Contig694 |
| | Corresponding to the former SEQ ID n^{o} 1398 |
| | Corresponding to the former SEQ ID n^{o} 1771 |
| SEQ ID N^{o} 3566 | Listeria monocytogenes 4b Contig695 |
| | Corresponding to the former SEQ ID n^{o} 1178 |
| | Corresponding to the former SEQ ID n^{o} 1684 |
| SEQ ID N^{o} 3567 | Listeria monocytogenes 4b Contig696 |
| | Corresponding to the former SEQ ID n^{o} 1433 |
| | Corresponding to the former SEQ ID n^{o} 1756 |
| SEQ ID N^{o} 3568 | Listeria monocytogenes 4b Contig697 |
| | Corresponding to the former SEQ ID n^{o} 1774 |
| SEQ ID N^{o} 3569 | Listeria monocytogenes 4b Contig698 |
| SEQ ID N^{o} 3570 | Listeria monocytogenes 4b Contig699 |
| | Corresponding to the former SEQ ID n^{o} 1300 |
| SEQ ID N^{o} 3571 | Listeria monocytogenes 4b Contig700 |
| SEQ ID N^{o} 3572 | Listeria monocytogenes 4b Contig701 |
| | Corresponding to the former SEQ ID n^{o} 1547 |
| SEQ ID N^{o} 3573 | Listeria monocytogenes 4b Contig702 |
| | Corresponding to the former SEQ ID n^{o} 1788 |
| SEQ ID N^{o} 3574 | Listeria monocytogenes 4b Contig703 |
| SEQ ID N^{o} 3575 | Listeria monocytogenes 4b Contig704 |
| | Corresponding to the former SEQ ID n^{o} 1872 |
| SEQ ID N^{o} 3576 | Listeria monocytogenes 4b Contig705 |
| | Corresponding to the former SEQ ID n^{o} 1861 |
| SEQ ID N^{o} 3577 | Listeria monocytogenes 4b Contig706 |
| | Corresponding to the former SEQ ID n^{o} 1932 |
| SEQ ID N^{o} 3578 | Listeria monocytogenes 4b Contig707 |
| | Corresponding to the former SEQ ID n^{o} 1553 |
| SEQ ID N^{o} 3579 | Listeria monocytogenes 4b Contig708 |
| | Corresponding to the former SEQ ID n^{o} 1473 |
| SEQ ID N^{o} 3580 | Listeria monocytogenes 4b Contig709 |
| | Corresponding to the former SEQ ID n^{o} 1328 |
| | Corresponding to the former SEQ ID n^{o} 1745 |
| SEQ ID N^{o} 3581 | Listeria monocytogenes 4b Contig710 |
| | Corresponding to the former SEQ ID n^{o} 1557 |
| SEQ ID N^{o} 3582 | Listeria monocytogenes 4b Contig711 |
| | Corresponding to the former SEQ ID n^{o} 1773 |
| SEQ ID N^{o} 3583 | Listeria monocytogenes 4b Contig712 |
| | Corresponding to the former SEQ ID n^{o} 1444 |
| SEQ ID N^{o} 3584 | Listeria monocytogenes 4b Contig713 |
| | Corresponding to the former SEQ ID n^{o} 1826 |
| SEQ ID N^{o} 3585 | Listeria monocytogenes 4b Contig714 |
| | Corresponding to the former SEQ ID n^{o} 1356 |
| | Corresponding to the former SEQ ID n^{o} 1612 |
| SEQ ID N^{o} 3586 | Listeria monocytogenes 4b Contig715 |
| | Corresponding to the former SEQ ID n^{o} 1952 |
| SEQ ID N^{o} 3587 | Listeria monocytogenes 4b Contig716 |
| | Corresponding to the former SEQ ID n^{o} 1874 |
| SEQ ID N^{o} 3588 | Listeria monocytogenes 4b Contig717 |
| | Corresponding to the former SEQ ID n^{o} 1095 |
| | Corresponding to the former SEQ ID n^{o} 1173 |
| SEQ ID N^{o} 3589 | Listeria monocytogenes 4b Contig718 |
| | Corresponding to the former SEQ ID n^{o} 1800 |
| SEQ ID N^{o} 3590 | Listeria monocytogenes 4b Contig719 |
| | Corresponding to the former SEQ ID n^{o} 1320 |
| | Corresponding to the former SEQ ID n^{o} 1832 |
| SEQ ID N^{o} 3591 | Listeria monocytogenes 4b Contig720 |
| | Corresponding to the former SEQ ID n^{o} 1160 |
| | Corresponding to the former SEQ ID n^{o} 1641 |
| SEQ ID N^{o} 3592 | Listeria monocytogenes 4b Contig721 |
| SEQ ID N^{o} 3593 | Listeria monocytogenes 4b Contig722 |
| | Corresponding to the former SEQ ID n^{o} 1144 |
| | Corresponding to the former SEQ ID n^{o} 1216 |
| SEQ ID N^{o} 3594 | Listeria monocytogenes 4b Contig723 |
| SEQ ID N^{o} 3595 | Listeria monocytogenes 4b Contig724 |
| | Corresponding to the former SEQ ID n^{o} 2026 |
| SEQ ID N^{o} 3596 | Listeria monocytogenes 4b Contig725 |
| | Corresponding to the former SEQ ID n^{o} 1226 |
| | Corresponding to the former SEQ ID n^{o} 1588 |
| SEQ ID N^{o} 3597 | Listeria monocytogenes 4b Contig726 |
| | Corresponding to the former SEQ ID n^{o} 1804 |
| SEQ ID N^{o} 3598 | Listeria monocytogenes 4b Contig727 |
| | Corresponding to the former SEQ ID n^{o} 1393 |
| SEQ ID N^{o} 3599 | Listeria monocytogenes 4b Contig728 |
| | Corresponding to the former SEQ ID n^{o} 1223 |
| SEQ ID N^{o} 3600 | Listeria monocytogenes 4b Contig729 |
| | Corresponding to the former SEQ ID n^{o} 1973 |
| SEQ ID N^{o} 3601 | Listeria monocytogenes 4b Contig730 |
| | Corresponding to the former SEQ ID n^{o} 1743 |
| SEQ ID N^{o} 3602 | Listeria monocytogenes 4b Contig731 |
| | Corresponding to the former SEQ ID n^{o} 1860 |
| SEQ ID N^{o} 3603 | Listeria monocytogenes 4b Contig732 |
| | Corresponding to the former SEQ ID n^{o} 1203 |
| SEQ ID N^{o} 3604 | Listeria monocytogenes 4b Contig733 |
| | Corresponding to the former SEQ ID n^{o} 1690 |
| | Corresponding to the former SEQ ID n^{o} 1701 |
| SEQ ID N^{o} 3605 | Listeria monocytogenes 4b Contig734 |
| | Corresponding to the former SEQ ID n^{o} 1525 |
| SEQ ID N^{o} 3606 | Listeria monocytogenes 4b Contig735 |
| | Corresponding to the former SEQ ID n^{o} 1272 |
| SEQ ID N^{o} 3607 | Listeria monocytogenes 4b Contig736 |
| SEQ ID N^{o} 3608 | Listeria monocytogenes 4b Contig737 |
| | Corresponding to the former SEQ ID n^{o} 1986 |
| SEQ ID N^{o} 3609 | Listeria monocytogenes 4b Contig738 |
| | Corresponding to the former SEQ ID n^{o} 1799 |
| SEQ ID N^{o} 3610 | Listeria monocytogenes 4b Contig739 |
| SEQ ID N^{o} 3611 | Listeria monocytogenes 4b Contig740 |
| | Corresponding to the former SEQ ID n^{o} 1070 |
| | Corresponding to the former SEQ ID n^{o} 1783 |
| SEQ ID N^{o} 3612 | Listeria monocytogenes 4b Contig741 |
| SEQ ID N^{o} 3613 | Listeria monocytogenes 4b Contig742 |
| SEQ ID N^{o} 3614 | Listeria monocytogenes 4b Contig743 |
| | Corresponding to the former SEQ ID n^{o} 1437 |
| SEQ ID N^{o} 3615 | Listeria monocytogenes 4b Contig744 |
| | Corresponding to the former SEQ ID n^{o} 1094 |
| | Corresponding to the former SEQ ID n^{o} 1523 |
| SEQ ID N^{o} 3616 | Listeria monocytogenes 4b Contig745 |
| | Corresponding to the former SEQ ID n^{o} 1929 |
| SEQ ID N^{o} 3617 | Listeria monocytogenes 4b Contig746 |
| | Corresponding to the former SEQ ID n^{o} 1383 |
| | Corresponding to the former SEQ ID n^{o} 1486 |
| SEQ ID N^{o} 3618 | Listeria monocytogenes 4b Contig747 |
| SEQ ID N^{o} 3619 | Listeria monocytogenes 4b Contig748 |
| | Corresponding to the former SEQ ID n^{o} 1957 |
| SEQ ID N^{o} 3620 | Listeria monocytogenes 4b Contig749 |
| SEQ ID N^{o} 3621 | Listeria monocytogenes 4b Contig750 |
| | Corresponding to the former SEQ ID n^{o} 1859 |
| | Corresponding to the former SEQ ID n^{o} 1963 |
| SEQ ID N^{o} 3622 | Listeria monocytogenes 4b Contig751 |
| SEQ ID N^{o} 3623 | Listeria monocytogenes 4b Contig752 |
| SEQ ID N^{o} 3624 | Listeria monocytogenes 4b Contig753 |
| | Corresponding to the former SEQ ID n^{o} 1971 |
| SEQ ID N^{o} 3625 | Listeria monocytogenes 4b Contig754 |
| | Corresponding to the former SEQ ID n^{o} 1189 |
| | Corresponding to the former SEQ ID n^{o} 1289 |
| | Corresponding to the former SEQ ID n^{o} 1619 |
| SEQ ID N^{o} 3626 | Listeria monocytogenes 4b Contig755 |
| SEQ ID N^{o} 3627 | Listeria monocytogenes 4b Contig756 |
| | Corresponding to the former SEQ ID n^{o} 1883 |
| SEQ ID N^{o} 3628 | Listeria monocytogenes 4b Contig757 |
| | Corresponding to the former SEQ ID n^{o} 1316 |
| | Corresponding to the former SEQ ID n^{o} 1460 |
| SEQ ID N^{o} 3629 | Listeria monocytogenes 4b Contig758 |
| SEQ ID N^{o} 3630 | Listeria monocytogenes 4b Contig759 |
| | Corresponding to the former SEQ ID n^{o} 1389 |
| SEQ ID N^{o} 3631 | Listeria monocytogenes 4b Contig760 |
| SEQ ID N^{o} 3632 | Listeria monocytogenes 4b Contig761 |
| | Corresponding to the former SEQ ID n^{o} 1397 |
| SEQ ID N^{o} 3633 | Listeria monocytogenes 4b Contig762 |
| | Corresponding to the former SEQ ID n^{o} 1261 |
| | Corresponding to the former SEQ ID n^{o} 1531 |
| SEQ ID N^{o} 3634 | Listeria monocytogenes 4b Contig763 |
| | Corresponding to the former SEQ ID n^{o} 1563 |
| SEQ ID N^{o} 3635 | Listeria monocytogenes 4b Contig764 |
| | Corresponding to the former SEQ ID n^{o} 1945 |
| SEQ ID N^{o} 3636 | Listeria monocytogenes 4b Contig765 |
| | Corresponding to the former SEQ ID n^{o} 1306 |
| SEQ ID N^{o} 3637 | Listeria monocytogenes 4b Contig766 |
| | Corresponding to the former SEQ ID n^{o} 1253 |
| SEQ ID N^{o} 3638 | Listeria monocytogenes 4b Contig767 |
| | Corresponding to the former SEQ ID n^{o} 1116 |
| | Corresponding to the former SEQ ID n^{o} 1154 |
| SEQ ID N^{o} 3639 | Listeria monocytogenes 4b Contig768 |
| | Corresponding to the former SEQ ID n^{o} 1807 |
| SEQ ID N^{o} 3640 | Listeria monocytogenes 4b Contig769 |
| | Corresponding to the former SEQ ID n^{o} 1580 |
| SEQ ID N^{o} 3641 | Listeria monocytogenes 4b Contig770 |
| | Corresponding to the former SEQ ID n^{o} 1234 |
| | Corresponding to the former SEQ ID n^{o} 1951 |
| SEQ ID N^{o} 3642 | Listeria monocytogenes 4b Contig771 |
| | Corresponding to the former SEQ ID n^{o} 1933 |
| SEQ ID N^{o} 3643 | Listeria monocytogenes 4b Contig772 |
| | Corresponding to the former SEQ ID n^{o} 1186 |
| | Corresponding to the former SEQ ID n^{o} 1462 |
| SEQ ID N^{o} 3644 | Listeria monocytogenes 4b Contig773 |
| | Corresponding to the former SEQ ID n^{o} 1073 |
| | Corresponding to the former SEQ ID n^{o} 1167 |
| | Corresponding to the former SEQ ID n^{o} 1322 |
| SEQ ID N^{o} 3645 | Listeria monocytogenes 4b Contig774 |
| | Corresponding to the former SEQ ID n^{o} 1686 |
| SEQ ID N^{o} 3646 | Listeria monocytogenes 4b Contig775 |
| | Corresponding to the former SEQ ID n^{o} 2005 |
| SEQ ID N^{o} 3647 | Listeria monocytogenes 4b Contig776 |
| | Corresponding to the former SEQ ID n^{o} 1385 |
| | Corresponding to the former SEQ ID n^{o} 1685 |
| SEQ ID N^{o} 3648 | Listeria monocytogenes 4b Contig777 |
| | Corresponding to the former SEQ ID n^{o} 1277 |
| | Corresponding to the former SEQ ID n^{o} 1785 |
| SEQ ID N^{o} 3649 | Listeria monocytogenes 4b Contig778 |
| SEQ ID N^{o} 3650 | Listeria monocytogenes 4b Contig779 |
| | Corresponding to the former SEQ ID n^{o} 1946 |
| SEQ ID N^{o} 3651 | Listeria monocytogenes 4b Contig780 |
| | Corresponding to the former SEQ ID n^{o} 1388 |
| | Corresponding to the former SEQ ID n^{o} 1732 |
| SEQ ID N^{o} 3652 | Listeria monocytogenes 4b Contig781 |
| | Corresponding to the former SEQ ID n^{o} 1652 |
| | Corresponding to the former SEQ ID n^{o} 1697 |
| SEQ ID N^{o} 3653 | Listeria monocytogenes 4b Contig782 |
| | Corresponding to the former SEQ ID n^{o} 1244 |
| | Corresponding to the former SEQ ID n^{o} 1286 |
| SEQ ID N^{o} 3654 | Listeria monocytogenes 4b Contig783 |
| | Corresponding to the former SEQ ID n^{o} 1275 |
| | Corresponding to the former SEQ ID n^{o} 1421 |
| SEQ ID N^{o} 3655 | Listeria monocytogenes 4b Contig784 |
| | Corresponding to the former SEQ ID n^{o} 1240 |
| SEQ ID N^{o} 3656 | Listeria monocytogenes 4b Contig785 |
| | Corresponding to the former SEQ ID n^{o} 1129 |
| | Corresponding to the former SEQ ID n^{o} 1384 |
| | Corresponding to the former SEQ ID n^{o} 1469 |
| SEQ ID N^{o} 3657 | Listeria monocytogenes 4b Contig786 |
| | Corresponding to the former SEQ ID n^{o} 1610 |
| | Corresponding to the former SEQ ID n^{o} 1857 |
| SEQ ID N^{o} 3658 | Listeria monocytogenes 4b Contig787 |
| | Corresponding to the former SEQ ID n^{o} 1484 |
| SEQ ID N^{o} 3659 | Listeria monocytogenes 4b Contig788 |
| | Corresponding to the former SEQ ID n^{o} 1081 |
| | Corresponding to the former SEQ ID n^{o} 1117 |
| | Corresponding to the former SEQ ID n^{o} 1196 |
| SEQ ID N^{o} 3660 | Listeria monocytogenes 4b Contig789 |
| | Corresponding to the former SEQ ID n^{o} 1175 |
| SEQ ID N^{o} 3661 | Listeria monocytogenes 4b Contig790 |
| | Corresponding to the former SEQ ID n^{o} 1727 |
| SEQ ID N^{o} 3662 | Listeria monocytogenes 4b Contig791 |
| | Corresponding to the former SEQ ID n^{o} 1925 |
| SEQ ID N^{o} 3663 | Listeria monocytogenes 4b Contig792 |
| | Corresponding to the former SEQ ID n^{o} 1134 |
| | Corresponding to the former SEQ ID n^{o} 1157 |
| | Corresponding to the former SEQ ID n^{o} 1779 |
| SEQ ID N^{o} 3664 | Listeria monocytogenes 4b Contig793 |
| | Corresponding to the former SEQ ID n^{o} 1795 |
| SEQ ID N^{o} 3665 | Listeria monocytogenes 4b Contig794 |
| | Corresponding to the former SEQ ID n^{o} 1988 |
| SEQ ID N^{o} 3666 | Listeria monocytogenes 4b Contig795 |
| | Corresponding to the former SEQ ID n^{o} 1616 |
| SEQ ID N^{o} 3667 | Listeria monocytogenes 4b Contig796 |
| SEQ ID N^{o} 3668 | Listeria monocytogenes 4b Contig797 |
| | Corresponding to the former SEQ ID n^{o} 1103 |
| SEQ ID N^{o} 3669 | Listeria monocytogenes 4b Contig798 |
| | Corresponding to the former SEQ ID n^{o} 1511 |
| SEQ ID N^{o} 3670 | Listeria monocytogenes 4b Contig799 |
| | Corresponding to the former SEQ ID n^{o} 1446 |
| SEQ ID N^{o} 3671 | Listeria monocytogenes 4b Contig800 |
| | Corresponding to the former SEQ ID n^{o} 1264 |
| | Corresponding to the former SEQ ID n^{o} 2017 |
| SEQ ID N^{o} 3672 | Listeria monocytogenes 4b Contig801 |
| | Corresponding to the former SEQ ID n^{o} 1151 |
| | Corresponding to the former SEQ ID n^{o} 1577 |
| SEQ ID N^{o} 3673 | Listeria monocytogenes 4b Contig802 |
| | Corresponding to the former SEQ ID n^{o} 1520 |
| | Corresponding to the former SEQ ID n^{o} 1755 |
| SEQ ID N^{o} 3674 | Listeria monocytogenes 4b Contig803 |
| | Corresponding to the former SEQ ID n^{o} 1291 |
| | Corresponding to the former SEQ ID n^{o} 1305 |
| | Corresponding to the former SEQ ID n^{o} 1589 |
| SEQ ID N^{o} 3675 | Listeria monocytogenes 4b Contig804 |
| | Corresponding to the former SEQ ID n^{o} 1207 |
| SEQ ID N^{o} 3676 | Listeria monocytogenes 4b Contig805 |
| | Corresponding to the former SEQ ID n^{o} 1987 |
| SEQ ID N^{o} 3677 | Listeria monocytogenes 4b Contig806 |
| | Corresponding to the former SEQ ID n^{o} 1912 |
| SEQ ID N^{o} 3678 | Listeria monocytogenes 4b Contig807 |
| | Corresponding to the former SEQ ID n^{o} 1432 |
| | Corresponding to the former SEQ ID n^{o} 1681 |
| SEQ ID N^{o} 3679 | Listeria monocytogenes 4b Contig808 |
| | Corresponding to the former SEQ ID n^{o} 1955 |
| SEQ ID N^{o} 3680 | Listeria monocytogenes 4b Contig809 |
| | Corresponding to the former SEQ ID n^{o} 1382 |
| SEQ ID N^{o} 3681 | Listeria monocytogenes 4b Contig810 |
| | Corresponding to the former SEQ ID n^{o} 1885 |
| SEQ ID N^{o} 3682 | Listeria monocytogenes 4b Contig811 |
| SEQ ID N^{o} 3683 | Listeria monocytogenes 4b Contig812 |
| | Corresponding to the former SEQ ID n^{o} 1451 |
| | Corresponding to the former SEQ ID n^{o} 1592 |
| SEQ ID N^{o} 3684 | Listeria monocytogenes 4b Contig813 |
| | Corresponding to the former SEQ ID n^{o} 1402 |
| | Corresponding to the former SEQ ID n^{o} 1647 |
| | Corresponding to the former SEQ ID n^{o} 1768 |
| SEQ ID N^{o} 3685 | Listeria monocytogenes 4b Contig814 |
| | Corresponding to the former SEQ ID n^{o} 1522 |
| SEQ ID N^{o} 3686 | Listeria monocytogenes 4b Contig815 |
| | Corresponding to the former SEQ ID n^{o} 1984 |
| SEQ ID N^{o} 3687 | Listeria monocytogenes 4b Contig816 |
| | Corresponding to the former SEQ ID n^{o} 1335 |
| SEQ ID N^{o} 3688 | Listeria monocytogenes 4b Contig817 |
| | Corresponding to the former SEQ ID n^{o} 2007 |
| SEQ ID N^{o} 3689 | Listeria monocytogenes 4b Contig818 |
| | Corresponding to the former SEQ ID n^{o} 1121 |
| SEQ ID N^{o} 3690 | Listeria monocytogenes 4b Contig819 |
| | Corresponding to the former SEQ ID n^{o} 1182 |
| SEQ ID N^{o} 3691 | Listeria monocytogenes 4b Contig820 |
| | Corresponding to the former SEQ ID n^{o} 1554 |
| SEQ ID N^{o} 3692 | Listeria monocytogenes 4b Contig821 |
| | Corresponding to the former SEQ ID n^{o} 1153 |
| | Corresponding to the former SEQ ID n^{o} 1458 |
| SEQ ID N^{o} 3693 | Listeria monocytogenes 4b Contig822 |
| | Corresponding to the former SEQ ID n^{o} 1254 |
| | Corresponding to the former SEQ ID n^{o} 1864 |
| SEQ ID N^{o} 3694 | Listeria monocytogenes 4b Contig823 |
| | Corresponding to the former SEQ ID n^{o} 1407 |
| | Corresponding to the former SEQ ID n^{o} 1736 |
| SEQ ID N^{o} 3695 | Listeria monocytogenes 4b Contig824 |
| | Corresponding to the former SEQ ID n^{o} 1412 |
| | Corresponding to the former SEQ ID n^{o} 1482 |
| SEQ ID N^{o} 3696 | Listeria monocytogenes 4b Contig825 |
| | Corresponding to the former SEQ ID n^{o} 1360 |
| | Corresponding to the former SEQ ID n^{o} 1375 |
| | Corresponding to the former SEQ ID n^{o} 1645 |
| SEQ ID N^{o} 3697 | Listeria monocytogenes 4b Contig826 |
| | Corresponding to the former SEQ ID n^{o} 1164 |
| SEQ ID N^{o} 3698 | Listeria monocytogenes 4b Contig827 |
| | Corresponding to the former SEQ ID n^{o} 1459 |
| | Corresponding to the former SEQ ID n^{o} 1772 |
| SEQ ID N^{o} 3699 | Listeria monocytogenes 4b Contig828 |
| | Corresponding to the former SEQ ID n^{o} 1334 |
| | Corresponding to the former SEQ ID n^{o} 1533 |
| | Corresponding to the former SEQ ID n^{o} 1750 |
| SEQ ID N^{o} 3700 | Listeria monocytogenes 4b Contig829 |
| | Corresponding to the former SEQ ID n^{o} 1586 |
| SEQ ID N^{o} 3701 | Listeria monocytogenes 4b Contig830 |
| | Corresponding to the former SEQ ID n^{o} 2021 |
| SEQ ID N^{o} 3702 | Listeria monocytogenes 4b Contig831 |
| | Corresponding to the former SEQ ID n^{o} 1374 |
| | Corresponding to the former SEQ ID n^{o} 1819 |
| SEQ ID N^{o} 3703 | Listeria monocytogenes 4b Contig832 |
| | Corresponding to the former SEQ ID n^{o} 1425 |
| | Corresponding to the former SEQ ID n^{o} 1598 |
| SEQ ID N^{o} 3704 | Listeria monocytogenes 4b Contig833 |
| | Corresponding to the former SEQ ID n^{o} 1198 |
| | Corresponding to the former SEQ ID n^{o} 1296 |
| SEQ ID N^{o} 3705 | Listeria monocytogenes 4b Contig834 |
| | Corresponding to the former SEQ ID n^{o} 1893 |
| SEQ ID N^{o} 3706 | Listeria monocytogenes 4b Contig835 |
| | Corresponding to the former SEQ ID n^{o} 1119 |
| | Corresponding to the former SEQ ID n^{o} 1720 |
| SEQ ID N^{o} 3707 | Listeria monocytogenes 4b Contig836 |
| | Corresponding to the former SEQ ID n^{o} 1457 |
| SEQ ID N^{o} 3708 | Listeria monocytogenes 4b Contig837 |
| | Corresponding to the former SEQ ID n^{o} 1655 |
| | Corresponding to the former SEQ ID n^{o} 1880 |
| SEQ ID N^{o} 3709 | Listeria monocytogenes 4b Contig838 |
| | Corresponding to the former SEQ ID n^{o} 1191 |
| SEQ ID N^{o} 3710 | Listeria monocytogenes 4b Contig839 |
| | Corresponding to the former SEQ ID n^{o} 1358 |
| SEQ ID N^{o} 3711 | Listeria monocytogenes 4b Contig840 |
| | Corresponding to the former SEQ ID n^{o} 1187 |
| | Corresponding to the former SEQ ID n^{o} 1495 |
| | Corresponding to the former SEQ ID n^{o} 1856 |
| SEQ ID N^{o} 3712 | Listeria monocytogenes 4b Contig841 |
| | Corresponding to the former SEQ ID n^{o} 1130 |
| SEQ ID N^{o} 3713 | Listeria monocytogenes 4b Contig842 |
| | Corresponding to the former SEQ ID n^{o} 1141 |
| | Corresponding to the former SEQ ID n^{o} 1292 |
| | Corresponding to the former SEQ ID n^{o} 1452 |
| SEQ ID N^{o} 3714 | Listeria monocytogenes 4b Contig843 |
| | Corresponding to the former SEQ ID n^{o} 1120 |
| | Corresponding to the former SEQ ID n^{o} 1967 |
| SEQ ID N^{o} 3715 | Listeria monocytogenes 4b Contig844 |
| | Corresponding to the former SEQ ID n^{o} 1954 |
| SEQ ID N^{o} 3716 | Listeria monocytogenes 4b Contig845 |
| | Corresponding to the former SEQ ID n^{o} 1966 |
| SEQ ID N^{o} 3717 | Listeria monocytogenes 4b Contig846 |
| | Corresponding to the former SEQ ID n^{o} 1680 |
| | Corresponding to the former SEQ ID n^{o} 1882 |
| SEQ ID N^{o} 3718 | Listeria monocytogenes 4b Contig847 |
| | Corresponding to the former SEQ ID n^{o} 1474 |
| | Corresponding to the former SEQ ID n^{o} 1842 |
| SEQ ID N^{o} 3719 | Listeria monocytogenes 4b Contig848 |
| | Corresponding to the former SEQ ID n^{o} 1102 |
| | Corresponding to the former SEQ ID n^{o} 1423 |
| | Corresponding to the former SEQ ID n^{o} 1559 |
| SEQ ID N^{o} 3720 | Listeria monocytogenes 4b Contig849 |
| | Corresponding to the former SEQ ID n^{o} 1128 |
| | Corresponding to the former SEQ ID n^{o} 1181 |
| | Corresponding to the former SEQ ID n^{o} 1599 |
| SEQ ID N^{o} 3721 | Listeria monocytogenes 4b Contig850 |
| | Corresponding to the former SEQ ID n^{o} 1269 |
| | Corresponding to the former SEQ ID n^{o} 1791 |
| SEQ ID N^{o} 3722 | Listeria monocytogenes 4b Contig851 |
| | Corresponding to the former SEQ ID n^{o} 1218 |
| | Corresponding to the former SEQ ID n^{o} 1928 |
| SEQ ID N^{o} 3723 | Listeria monocytogenes 4b Contig852 |
| | Corresponding to the former SEQ ID n^{o} 1938 |
| SEQ ID N^{o} 3724 | Listeria monocytogenes 4b Contig853 |
| | Corresponding to the former SEQ ID n^{o} 2028 |
| SEQ ID N^{o} 3725 | Listeria monocytogenes 4b Contig854 |
| | Corresponding to the former SEQ ID n^{o} 1376 |
| | Corresponding to the former SEQ ID n^{o} 1870 |
| SEQ ID N^{o} 3726 | Listeria monocytogenes 4b Contig855 |
| | Corresponding to the former SEQ ID n^{o} 1278 |
| | Corresponding to the former SEQ ID n^{o} 1634 |
| SEQ ID N^{o} 3727 | Listeria monocytogenes 4b Contig856 |
| | Corresponding to the former SEQ ID n^{o} 1312 |
| | Corresponding to the former SEQ ID n^{o} 1705 |
| SEQ ID N^{o} 3728 | Listeria monocytogenes 4b Contig857 |
| | Corresponding to the former SEQ ID n^{o} 1479 |
| | Corresponding to the former SEQ ID n^{o} 1972 |
| SEQ ID N^{o} 3729 | Listeria monocytogenes 4b Contig858 |
| | Corresponding to the former SEQ ID n^{o} 1307 |
| | Corresponding to the former SEQ ID n^{o} 1829 |
| SEQ ID N^{o} 3730 | Listeria monocytogenes 4b Contig859 |
| | Corresponding to the former SEQ ID n^{o} 1123 |
| | Corresponding to the former SEQ ID n^{o} 1687 |
| SEQ ID N^{o} 3731 | Listeria monocytogenes 4b Contig860 |
| | Corresponding to the former SEQ ID n^{o} 1905 |
| SEQ ID N^{o} 3732 | Listeria monocytogenes 4b Contig861 |
| | Corresponding to the former SEQ ID n^{o} 1579 |
| SEQ ID N^{o} 3733 | Listeria monocytogenes 4b Contig862 |
| | Corresponding to the former SEQ ID n^{o} 1080 |
| | Corresponding to the former SEQ ID n^{o} 1146 |
| SEQ ID N^{o} 3734 | Listeria monocytogenes 4b Contig863 |
| | Corresponding to the former SEQ ID n^{o} 1111 |
| | Corresponding to the former SEQ ID n^{o} 1514 |
| SEQ ID N^{o} 3735 | Listeria monocytogenes 4b Contig864 |
| | Corresponding to the former SEQ ID n^{o} 1139 |
| | Corresponding to the former SEQ ID n^{o} 1602 |
| SEQ ID N^{o} 3736 | Listeria monocytogenes 4b Contig865 |
| | Corresponding to the former SEQ ID n^{o} 1221 |
| | Corresponding to the former SEQ ID n^{o} 2010 |
| SEQ ID N^{o} 3737 | Listeria monocytogenes 4b Contig866 |
| | Corresponding to the former SEQ ID n^{o} 1174 |
| | Corresponding to the former SEQ ID n^{o} 1480 |
| | Corresponding to the former SEQ ID n^{o} 1895 |
| SEQ ID N^{o} 3738 | Listeria monocytogenes 4b Contig867 |
| | Corresponding to the former SEQ ID n^{o} 1780 |
| | Corresponding to the former SEQ ID n^{o} 1784 |
| SEQ ID N^{o} 3739 | Listeria monocytogenes 4b Contig868 |
| | Corresponding to the former SEQ ID n^{o} 2009 |
| SEQ ID N^{o} 3740 | Listeria monocytogenes 4b Contig869 |
| | Corresponding to the former SEQ ID n^{o} 1308 |
| | Corresponding to the former SEQ ID n^{o} 1597 |
| SEQ ID N^{o} 3741 | Listeria monocytogenes 4b Contig870 |
| | Corresponding to the former SEQ ID n^{o} 1311 |
| | Corresponding to the former SEQ ID n^{o} 1315 |
| | Corresponding to the former SEQ ID n^{o} 2003 |
| SEQ ID N^{o} 3742 | Listeria monocytogenes 4b Contig871 |
| | Corresponding to the former SEQ ID n^{o} 1493 |
| | Corresponding to the former SEQ ID n^{o} 1707 |
| SEQ ID N^{o} 3743 | Listeria monocytogenes 4b Contig872 |
| | Corresponding to the former SEQ ID n^{o} 1089 |
| | Corresponding to the former SEQ ID n^{o} 1624 |
| SEQ ID N^{o} 3744 | Listeria monocytogenes 4b Contig873 |
| | Corresponding to the former SEQ ID n^{o} 1846 |
| SEQ ID N^{o} 3745 | Listeria monocytogenes 4b Contig874 |
| | Corresponding to the former SEQ ID n^{o} 1603 |
| | Corresponding to the former SEQ ID n^{o} 1921 |
| SEQ ID N^{o} 3746 | Listeria monocytogenes 4b Contig875 |
| | Corresponding to the former SEQ ID n^{o} 1268 |
| | Corresponding to the former SEQ ID n^{o} 1752 |
| SEQ ID N^{o} 3747 | Listeria monocytogenes 4b Contig876 |
| | Corresponding to the former SEQ ID n^{o} 1336 |
| | Corresponding to the former SEQ ID n^{o} 1623 |
| SEQ ID N^{o} 3748 | Listeria monocytogenes 4b Contig877 |
| | Corresponding to the former SEQ ID n^{o} 1259 |
| | Corresponding to the former SEQ ID n^{o} 1551 |
| | Corresponding to the former SEQ ID n^{o} 1866 |
| SEQ ID N^{o} 3749 | Listeria monocytogenes 4b Contig878 |
| | Corresponding to the former SEQ ID n^{o} 1224 |
| SEQ ID N^{o} 3750 | Listeria monocytogenes 4b Contig879 |
| | Corresponding to the former SEQ ID n^{o} 1418 |
| | Corresponding to the former SEQ ID n^{o} 1571 |
| | Corresponding to the former SEQ ID n^{o} 1809 |
| SEQ ID N^{o} 3751 | Listeria monocytogenes 4b Contig880 |
| | Corresponding to the former SEQ ID n^{o} 1420 |
| | Corresponding to the former SEQ ID n^{o} 1664 |
| SEQ ID N^{o} 3752 | Listeria monocytogenes 4b Contig881 |
| | Corresponding to the former SEQ ID n^{o} 1137 |
| | Corresponding to the former SEQ ID n^{o} 1367 |
| SEQ ID N^{o} 3753 | Listeria monocytogenes 4b Contig882 |
| | Corresponding to the former SEQ ID n^{o} 1222 |
| | Corresponding to the former SEQ ID n^{o} 1318 |
| | Corresponding to the former SEQ ID n^{o} 1758 |
| SEQ ID N^{o} 3754 | Listeria monocytogenes 4b Contig883 |
| | Corresponding to the former SEQ ID n^{o} 1978 |
| SEQ ID N^{o} 3755 | Listeria monocytogenes 4b Contig884 |
| | Corresponding to the former SEQ ID n^{o} 1793 |
| | Corresponding to the former SEQ ID n^{o} 1855 |
| SEQ ID N^{o} 3756 | Listeria monocytogenes 4b Contig885 |
| | Corresponding to the former SEQ ID n^{o} 1236 |
| | Corresponding to the former SEQ ID n^{o} 1666 |
| | Corresponding to the former SEQ ID n^{o} 1892 |
| SEQ ID N^{o} 3757 | Listeria monocytogenes 4b Contig886 |
| | Corresponding to the former SEQ ID n^{o} 1466 |
| | Corresponding to the former SEQ ID n^{o} 1825 |
| SEQ ID N^{o} 3758 | Listeria monocytogenes 4b Contig887 |
| | Corresponding to the former SEQ ID n^{o} 1901 |
| SEQ ID N^{o} 3759 | Listeria monocytogenes 4b Contig888 |
| | Corresponding to the former SEQ ID n^{o} 1761 |
| | Corresponding to the former SEQ ID n^{o} 1947 |
| SEQ ID N^{o} 3760 | Listeria monocytogenes 4b Contig889 |
| | Corresponding to the former SEQ ID n^{o} 1517 |
| | Corresponding to the former SEQ ID n^{o} 1943 |
| SEQ ID N^{o} 3761 | Listeria monocytogenes 4b Contig890 |
| | Corresponding to the former SEQ ID n^{o} 1654 |
| | Corresponding to the former SEQ ID n^{o} 1787 |
| SEQ ID N^{o} 3762 | Listeria monocytogenes 4b Contig891 |
| | Corresponding to the former SEQ ID n^{o} 1427 |
| | Corresponding to the former SEQ ID n^{o} 2019 |
| SEQ ID N^{o} 3763 | Listeria monocytogenes 4b Contig892 |
| | Corresponding to the former SEQ ID n^{o} 1441 |
| | Corresponding to the former SEQ ID n^{o} 1974 |
| SEQ ID N^{o} 3764 | Listeria monocytogenes 4b Contig893 |
| | Corresponding to the former SEQ ID n^{o} 1411 |
| | Corresponding to the former SEQ ID n^{o} 1733 |
| SEQ ID N^{o} 3765 | Listeria monocytogenes 4b Contig894 |
| SEQ ID N^{o} 3766 | Listeria monocytogenes 4b Contig895 |
| | Corresponding to the former SEQ ID n^{o} 1994 |
| SEQ ID N^{o} 3767 | Listeria monocytogenes 4b Contig896 |
| | Corresponding to the former SEQ ID n^{o} 1552 |
| SEQ ID N^{o} 3768 | Listeria monocytogenes 4b Contig897 |
| | Corresponding to the former SEQ ID n^{o} 1442 |
| SEQ ID N^{o} 3769 | Listeria monocytogenes 4b Contig898 |
| | Corresponding to the former SEQ ID n^{o} 1150 |
| | Corresponding to the former SEQ ID n^{o} 1937 |
| | Corresponding to the former SEQ ID n^{o} 1980 |
| SEQ ID N^{o} 3770 | Listeria monocytogenes 4b Contig899 |
| | Corresponding to the former SEQ ID n^{o} 1258 |
| | Corresponding to the former SEQ ID n^{o} 1816 |
| SEQ ID N^{o} 3771 | Listeria monocytogenes 4b Contig900 |
| | Corresponding to the former SEQ ID n^{o} 1983 |
| SEQ ID N^{o} 3772 | Listeria monocytogenes 4b Contig901 |
| | Corresponding to the former SEQ ID n^{o} 1422 |
| | Corresponding to the former SEQ ID n^{o} 1726 |
| SEQ ID N^{o} 3773 | Listeria monocytogenes 4b Contig902 |
| | Corresponding to the former SEQ ID n^{o} 1410 |
| | Corresponding to the former SEQ ID n^{o} 1778 |
| SEQ ID N^{o} 3774 | Listeria monocytogenes 4b Contig903 |
| | Corresponding to the former SEQ ID n^{o} 1232 |
| | Corresponding to the former SEQ ID n^{o} 1487 |
| SEQ ID N^{o} 3775 | Listeria monocytogenes 4b Contig904 |
| | Corresponding to the former SEQ ID n^{o} 1898 |
| SEQ ID N^{o} 3776 | Listeria monocytogenes 4b Contig905 |
| | Corresponding to the former SEQ ID n^{o} 1368 |
| | Corresponding to the former SEQ ID n^{o} 1985 |
| SEQ ID N^{o} 3777 | Listeria monocytogenes 4b Contig906 |
| | Corresponding to the former SEQ ID n^{o} 1997 |
| SEQ ID N^{o} 3778 | Listeria monocytogenes 4b Contig907 |
| | Corresponding to the former SEQ ID n^{o} 1321 |
| | Corresponding to the former SEQ ID n^{o} 1542 |
| | Corresponding to the former SEQ ID n^{o} 1843 |
| SEQ ID N^{o} 3779 | Listeria monocytogenes 4b Contig908 |
| | Corresponding to the former SEQ ID n^{o} 1530 |
| | Corresponding to the former SEQ ID n^{o} 1667 |
| SEQ ID N^{o} 3780 | Listeria monocytogenes 4b Contig909 |
| | Corresponding to the former SEQ ID n^{o} 1534 |
| | Corresponding to the former SEQ ID n^{o} 1936 |
| SEQ ID N^{o} 3781 | Listeria monocytogenes 4b Contig910 |
| | Corresponding to the former SEQ ID n^{o} 1567 |
| | Corresponding to the former SEQ ID n^{o} 1587 |
| | Corresponding to the former SEQ ID n^{o} 1642 |
| | Corresponding to the former SEQ ID n^{o} 1674 |
| SEQ ID N^{o} 3782 | Listeria monocytogenes 4b Contig911 |
| | Corresponding to the former SEQ ID n^{o} 2000 |
| SEQ ID N^{o} 3783 | Listeria monocytogenes 4b Contig912 |
| | Corresponding to the former SEQ ID n^{o} 1909 |
| SEQ ID N^{o} 3784 | Listeria monocytogenes 4b Contig913 |
| | Corresponding to the former SEQ ID n^{o} 1106 |
| | Corresponding to the former SEQ ID n^{o} 1365 |
| | Corresponding to the former SEQ ID n^{o} 1734 |
| SEQ ID N^{o} 3785 | Listeria monocytogenes 4b Contig914 |
| | Corresponding to the former SEQ ID n^{o} 1284 |
| | Corresponding to the former SEQ ID n^{o} 1309 |
| | Corresponding to the former SEQ ID n^{o} 1613 |
| SEQ ID N^{o} 3786 | Listeria monocytogenes 4b Contig915 |
| | Corresponding to the former SEQ ID n^{o} 2002 |
| SEQ ID N^{o} 3787 | Listeria monocytogenes 4b Contig916 |
| | Corresponding to the former SEQ ID n^{o} 1271 |
| | Corresponding to the former SEQ ID n^{o} 1941 |
| SEQ ID N^{o} 3788 | Listeria monocytogenes 4b Contig917 |
| | Corresponding to the former SEQ ID n^{o} 1104 |
| | Corresponding to the former SEQ ID n^{o} 2030 |
| SEQ ID N^{o} 3789 | Listeria monocytogenes 4b Contig918 |
| | Corresponding to the former SEQ ID n^{o} 1959 |
| SEQ ID N^{o} 3790 | Listeria monocytogenes 4b Contig919 |
| | Corresponding to the former SEQ ID n^{o} 1266 |
| | Corresponding to the former SEQ ID n^{o} 2020 |
| SEQ ID N^{o} 3791 | Listeria monocytogenes 4b Contig920 |
| | Corresponding to the former SEQ ID n^{o} 1405 |
| | Corresponding to the former SEQ ID n^{o} 1718 |
| | Corresponding to the former SEQ ID n^{o} 1919 |
| SEQ ID N^{o} 3792 | Listeria monocytogenes 4b Contig921 |
| | Corresponding to the former SEQ ID n^{o} 1908 |
| SEQ ID N^{o} 3793 | Listeria monocytogenes 4b Contig922 |
| | Corresponding to the former SEQ ID n^{o} 1786 |
| SEQ ID N^{o} 3794 | Listeria monocytogenes 4b Contig923 |
| | Corresponding to the former SEQ ID n^{o} 1370 |
| | Corresponding to the former SEQ ID n^{o} 1371 |
| | Corresponding to the former SEQ ID n^{o} 1372 |
| | Corresponding to the former SEQ ID n^{o} 1574 |
| SEQ ID N^{o} 3795 | Listeria monocytogenes 4b Contig924 |
| | Corresponding to the former SEQ ID n^{o} 1488 |
| SEQ ID N^{o} 3796 | Listeria monocytogenes 4b Contig925 |
| | Corresponding to the former SEQ ID n^{o} 1532 |
| | Corresponding to the former SEQ ID n^{o} 2008 |
| SEQ ID N^{o} 3797 | Listeria monocytogenes 4b Contig926 |
| | Corresponding to the former SEQ ID n^{o} 1677 |
| | Corresponding to the former SEQ ID n^{o} 1906 |
| SEQ ID N^{o} 3798 | Listeria monocytogenes 4b Contig927 |
| | Corresponding to the former SEQ ID n^{o} 1497 |
| | Corresponding to the former SEQ ID n^{o} 1699 |
| | Corresponding to the former SEQ ID n^{o} 1700 |
| | Corresponding to the former SEQ ID n^{o} 1948 |
| SEQ ID N^{o} 3799 | Listeria monocytogenes 4b Contig928 |
| | Corresponding to the former SEQ ID n^{o} 1891 |
| SEQ ID N^{o} 3800 | Listeria monocytogenes 4b Contig929 |
| | Corresponding to the former SEQ ID n^{o} 1633 |
| | Corresponding to the former SEQ ID n^{o} 1656 |
| SEQ ID N^{o} 3801 | Listeria monocytogenes 4b Contig930 |
| | Corresponding to the former SEQ ID n^{o} 1419 |
| | Corresponding to the former SEQ ID n^{o} 1494 |
| SEQ ID N^{o} 3802 | Listeria monocytogenes 4b Contig931 |
| | Corresponding to the former SEQ ID n^{o} 2027 |
| SEQ ID N^{o} 3803 | Listeria monocytogenes 4b Contig932 |
| | Corresponding to the former SEQ ID n^{o} 1814 |
| | Corresponding to the former SEQ ID n^{o} 1828 |
| SEQ ID N^{o} 3804 | Listeria monocytogenes 4b Contig933 |
| | Corresponding to the former SEQ ID n^{o} 1400 |
| | Corresponding to the former SEQ ID n^{o} 1628 |
| | Corresponding to the former SEQ ID n^{o} 1698 |
| SEQ ID N^{o} 3805 | Listeria monocytogenes 4b Contig934 |
| | Corresponding to the former SEQ ID n^{o} 1513 |
| | Corresponding to the former SEQ ID n^{o} 1695 |
| | Corresponding to the former SEQ ID n^{o} 1960 |
| SEQ ID N^{o} 3806 | Listeria monocytogenes 4b Contig935 |
| | Corresponding to the former SEQ ID n^{o} 1648 |
| | Corresponding to the former SEQ ID n^{o} 2018 |
| SEQ ID N^{o} 3807 | Listeria monocytogenes 4b Contig936 |
| | Corresponding to the former SEQ ID n^{o} 1238 |
| | Corresponding to the former SEQ ID n^{o} 1636 |
| SEQ ID N^{o} 3808 | Listeria monocytogenes 4b Contig937 |
| SEQ ID N^{o} 3809 | Listeria monocytogenes 4b Contig938 |
| | Corresponding to the former SEQ ID n^{o} 1341 |
| | Corresponding to the former SEQ ID n^{o} 1836 |
| | Corresponding to the former SEQ ID n^{o} 1848 |
| SEQ ID N^{o} 3810 | Listeria monocytogenes 4b Contig939 |
| | Corresponding to the former SEQ ID n^{o} 1087 |
| | Corresponding to the former SEQ ID n^{o} 1381 |
| SEQ ID N^{o} 3811 | Listeria monocytogenes 4b Contig940 |
| | Corresponding to the former SEQ ID n^{o} 1288 |
| | Corresponding to the former SEQ ID n^{o} 1386 |
| | Corresponding to the former SEQ ID n^{o} 1881 |
| SEQ ID N^{o} 3812 | Listeria monocytogenes 4b Contig941 |
| | Corresponding to the former SEQ ID n^{o} 1729 |
| | Corresponding to the former SEQ ID n^{o} 2014 |
| SEQ ID N^{o} 3813 | Listeria monocytogenes 4b Contig942 |
| | Corresponding to the former SEQ ID n^{o} 1319 |
| | Corresponding to the former SEQ ID n^{o} 1470 |
| | Corresponding to the former SEQ ID n^{o} 1904 |
| SEQ ID N^{o} 3814 | Listeria monocytogenes 4b Contig943 |
| | Corresponding to the former SEQ ID n^{o} 1447 |
| | Corresponding to the former SEQ ID n^{o} 1810 |
| SEQ ID N^{o} 3815 | Listeria monocytogenes 4b Contig944 |
| | Corresponding to the former SEQ ID n^{o} 1999 |
| SEQ ID N^{o} 3816 | Listeria monocytogenes 4b Contig945 |
| | Corresponding to the former SEQ ID n^{o} 1127 |
| | Corresponding to the former SEQ ID n^{o} 1504 |
| | Corresponding to the former SEQ ID n^{o} 1507 |
| | Corresponding to the former SEQ ID n^{o} 1631 |
| SEQ ID N^{o} 3817 | Listeria monocytogenes 4b Contig946 |
| | Corresponding to the former SEQ ID n^{o} 2011 |
| SEQ ID N^{o} 3818 | Listeria monocytogenes 4b Contig947 |
| | Corresponding to the former SEQ ID n^{o} 1475 |
| | Corresponding to the former SEQ ID n^{o} 1611 |
| | Corresponding to the former SEQ ID n^{o} 1672 |
| SEQ ID N^{o} 3819 | Listeria monocytogenes 4b Contig948 |
| | Corresponding to the former SEQ ID n^{o} 1088 |
| | Corresponding to the former SEQ ID n^{o} 1539 |
| SEQ ID N^{o} 3820 | Listeria monocytogenes 4b Contig949 |
| | Corresponding to the former SEQ ID n^{o} 1204 |
| | Corresponding to the former SEQ ID n^{o} 1347 |
| | Corresponding to the former SEQ ID n^{o} 1845 |
| SEQ ID N^{o} 3821 | Listeria monocytogenes 4b Contig950 |
| | Corresponding to the former SEQ ID n^{o} 1706 |
| | Corresponding to the former SEQ ID n^{o} 1869 |
| | Corresponding to the former SEQ ID n^{o} 1976 |
| SEQ ID N^{o} 3822 | Listeria monocytogenes 4b Contig951 |
| | Corresponding to the former SEQ ID n^{o} 1620 |
| SEQ ID N^{o} 3823 | Listeria monocytogenes 4b Contig952 |
| | Corresponding to the former SEQ ID n^{o} 1886 |
| | Corresponding to the former SEQ ID n^{o} 1935 |
| SEQ ID N^{o} 3824 | Listeria monocytogenes 4b Contig953 |
| | Corresponding to the former SEQ ID n^{o} 1279 |
| | Corresponding to the former SEQ ID n^{o} 1301 |
| | Corresponding to the former SEQ ID n^{o} 1827 |
| SEQ ID N^{o} 3825 | Listeria monocytogenes 4b Contig954 |
| | Corresponding to the former SEQ ID n^{o} 1605 |
| | Corresponding to the former SEQ ID n^{o} 1753 |
| | Corresponding to the former SEQ ID n^{o} 1792 |
| SEQ ID N^{o} 3826 | Listeria monocytogenes 4b Contig955 |
| | Corresponding to the former SEQ ID n^{o} 1998 |
| SEQ ID N^{o} 3827 | Listeria monocytogenes 4b Contig956 |
| | Corresponding to the former SEQ ID n^{o} 1310 |
| | Corresponding to the former SEQ ID n^{o} 1632 |
| | Corresponding to the former SEQ ID n^{o} 1853 |
| SEQ ID N^{o} 3828 | Listeria monocytogenes 4b Contig957 |
| | Corresponding to the former SEQ ID n^{o} 1914 |
| | Corresponding to the former SEQ ID n^{o} 1968 |
| SEQ ID N^{o} 3829 | Listeria monocytogenes 4b Contig958 |
| | Corresponding to the former SEQ ID n^{o} 1569 |
| | Corresponding to the former SEQ ID n^{o} 1801 |
| SEQ ID N^{o} 3830 | Listeria monocytogenes 4b Contig959 |
| | Corresponding to the former SEQ ID n^{o} 1369 |
| | Corresponding to the former SEQ ID n^{o} 1931 |
| SEQ ID N^{o} 3831 | Listeria monocytogenes 4b Contig960 |
| | Corresponding to the former SEQ ID n^{o} 1247 |
| | Corresponding to the former SEQ ID n^{o} 1617 |
| | Corresponding to the former SEQ ID n^{o} 1731 |
| SEQ ID N^{o} 3832 | Listeria monocytogenes 4b Contig961 |
| | Corresponding to the former SEQ ID n^{o} 1302 |
| | Corresponding to the former SEQ ID n^{o} 1920 |
| | Corresponding to the former SEQ ID n^{o} 2012 |
| SEQ ID N^{o} 3833 | Listeria monocytogenes 4b Contig962 |
| | Corresponding to the former SEQ ID n^{o} 1068 |
| | Corresponding to the former SEQ ID n^{o} 1072 |
| | Corresponding to the former SEQ ID n^{o} 1635 |
| SEQ ID N^{o} 3834 | Listeria monocytogenes 4b Contig963 |
| | Corresponding to the former SEQ ID n^{o} 1757 |
| | Corresponding to the former SEQ ID n^{o} 2024 |
| SEQ ID N^{o} 3835 | Listeria monocytogenes 4b Contig964 |
| | Corresponding to the former SEQ ID n^{o} 1509 |
| | Corresponding to the former SEQ ID n^{o} 1831 |
| SEQ ID N^{o} 3836 | Listeria monocytogenes 4b Contig965 |
| | Corresponding to the former SEQ ID n^{o} 1097 |
| | Corresponding to the former SEQ ID n^{o} 1230 |
| | Corresponding to the former SEQ ID n^{o} 1760 |
| SEQ ID N^{o} 3837 | Listeria monocytogenes 4b Contig966 |
| | Corresponding to the former SEQ ID n^{o} 1343 |
| | Corresponding to the former SEQ ID n^{o} 1766 |
| | Corresponding to the former SEQ ID n^{o} 1878 |
| SEQ ID N^{o} 3838 | Listeria monocytogenes 4b Contig967 |
| | Corresponding to the former SEQ ID n^{o} 1593 |
| | Corresponding to the former SEQ ID n^{o} 1604 |
| | Corresponding to the former SEQ ID n^{o} 1979 |
| SEQ ID N^{o} 3839 | Listeria monocytogenes 4b Contig968 |
| | Corresponding to the former SEQ ID n^{o} 1863 |
| | Corresponding to the former SEQ ID n^{o} 1969 |
| SEQ ID N^{o} 3840 | Listeria monocytogenes 4b Contig969 |
| | Corresponding to the former SEQ ID n^{o} 1339 |
| | Corresponding to the former SEQ ID n^{o} 1608 |
| | Corresponding to the former SEQ ID n^{o} 1942 |
| SEQ ID N^{o} 3841 | Listeria monocytogenes 4b Contig970 |
| | Corresponding to the former SEQ ID n^{o} 2038 |
| SEQ ID N^{o} 3842 | Listeria monocytogenes 4b Contig971 |
| | Corresponding to the former SEQ ID n^{o} 1716 |
| | Corresponding to the former SEQ ID n^{o} 1854 |
| SEQ ID N^{o} 3843 | Listeria monocytogenes 4b Contig972 |
| | Corresponding to the former SEQ ID n^{o} 1132 |
| | Corresponding to the former SEQ ID n^{o} 1354 |
| | Corresponding to the former SEQ ID n^{o} 1927 |
| | Corresponding to the former SEQ ID n^{o} 1975 |
| SEQ ID N^{o} 3844 | Listeria monocytogenes 4b Contig973 |
| | Corresponding to the former SEQ ID n^{o} 1541 |
| | Corresponding to the former SEQ ID n^{o} 1564 |
| SEQ ID N^{o} 3845 | Listeria monocytogenes 4b Contig974 |
| | Corresponding to the former SEQ ID n^{o} 1201 |
| | Corresponding to the former SEQ ID n^{o} 1797 |
| | Corresponding to the former SEQ ID n^{o} 1910 |
| | Corresponding to the former SEQ ID n^{o} 1981 |
| SEQ ID N^{o} 3846 | Listeria monocytogenes 4b Contig975 |
| | Corresponding to the former SEQ ID n^{o} 1342 |
| | Corresponding to the former SEQ ID n^{o} 1649 |
| | Corresponding to the former SEQ ID n^{o} 1751 |
| | Corresponding to the former SEQ ID n^{o} 1944 |
| SEQ ID N^{o} 3847 | Listeria monocytogenes 4b Contig976 |
| | Corresponding to the former SEQ ID n^{o} 1742 |
| | Corresponding to the former SEQ ID n^{o} 1896 |
| SEQ ID N^{o} 3848 | Listeria monocytogenes 4b Contig977 |
| | Corresponding to the former SEQ ID n^{o} 1079 |
| | Corresponding to the former SEQ ID n^{o} 1868 |
| | Corresponding to the former SEQ ID n^{o} 1875 |
| SEQ ID N^{o} 3849 | Listeria monocytogenes 4b Contig978 |
| | Corresponding to the former SEQ ID n^{o} 2013 |
| SEQ ID N^{o} 3850 | Listeria monocytogenes 4b Contig979 |
| | Corresponding to the former SEQ ID n^{o} 1818 |
| | Corresponding to the former SEQ ID n^{o} 1884 |
| SEQ ID N^{o} 3851 | Listeria monocytogenes 4b Contig980 |
| | Corresponding to the former SEQ ID n^{o} 1359 |
| | Corresponding to the former SEQ ID n^{o} 1519 |
| | Corresponding to the former SEQ ID n^{o} 1839 |
| SEQ ID N^{o} 3852 | Listeria monocytogenes 4b Contig981 |
| | Corresponding to the former SEQ ID n^{o} 1414 |
| | Corresponding to the former SEQ ID n^{o} 1782 |
| | Corresponding to the former SEQ ID n^{o} 1900 |
| SEQ ID N^{o} 3853 | Listeria monocytogenes 4b Contig982 |
| | Corresponding to the former SEQ ID n^{o} 1566 |
| SEQ ID N^{o} 3854 | Listeria monocytogenes 4b Contig983 |
| | Corresponding to the former SEQ ID n^{o} 2033 |
| SEQ ID N^{o} 3855 | Listeria monocytogenes 4b Contig984 |
| | Corresponding to the former SEQ ID n^{o} 1330 |
| | Corresponding to the former SEQ ID n^{o} 1748 |
| | Corresponding to the former SEQ ID n^{o} 1790 |
| | Corresponding to the former SEQ ID n^{o} 1962 |
| SEQ ID N^{o} 3856 | Listeria monocytogenes 4b Contig985 |
| | Corresponding to the former SEQ ID n^{o} 1682 |
| | Corresponding to the former SEQ ID n^{o} 2031 |
| SEQ ID N^{o} 3857 | Listeria monocytogenes 4b Contig986 |
| | Corresponding to the former SEQ ID n^{o} 1468 |
| | Corresponding to the former SEQ ID n^{o} 1606 |
| | Corresponding to the former SEQ ID n^{o} 1930 |
| SEQ ID N^{o} 3858 | Listeria monocytogenes 4b Contig987 |
| | Corresponding to the former SEQ ID n^{o} 1740 |
| | Corresponding to the former SEQ ID n^{o} 2034 |
| SEQ ID N^{o} 3859 | Listeria monocytogenes 4b Contig988 |
| | Corresponding to the former SEQ ID n^{o} 1156 |
| | Corresponding to the former SEQ ID n^{o} 1241 |
| | Corresponding to the former SEQ ID n^{o} 1715 |
| | Corresponding to the former SEQ ID n^{o} 1958 |
| SEQ ID N^{o} 3860 | Listeria monocytogenes 4b Contig989 |
| | Corresponding to the former SEQ ID n^{o} 1158 |
| | Corresponding to the former SEQ ID n^{o} 1719 |
| | Corresponding to the former SEQ ID n^{o} 2023 |
| SEQ ID N^{o} 3861 | Listeria monocytogenes 4b Contig990 |
| | Corresponding to the former SEQ ID n^{o} 1110 |
| | Corresponding to the former SEQ ID n^{o} 1911 |
| | Corresponding to the former SEQ ID n^{o} 2022 |
| SEQ ID N^{o} 3862 | Listeria monocytogenes 4b Contig991 |
| | Corresponding to the former SEQ ID n^{o} 1190 |
| | Corresponding to the former SEQ ID n^{o} 1735 |
| | Corresponding to the former SEQ ID n^{o} 1823 |
| | Corresponding to the former SEQ ID n^{o} 1824 |
| SEQ ID N^{o} 3863 | Listeria monocytogenes 4b Contig992 |
| | Corresponding to the former SEQ ID n^{o} 1257 |
| | Corresponding to the former SEQ ID n^{o} 1907 |
| | Corresponding to the former SEQ ID n^{o} 1989 |
| SEQ ID N^{o} 3864 | Listeria monocytogenes 4b Contig993 |
| | Corresponding to the former SEQ ID n^{o} 1802 |
| | Corresponding to the former SEQ ID n^{o} 1803 |
| | Corresponding to the former SEQ ID n^{o} 1833 |
| | Corresponding to the former SEQ ID n^{o} 2016 |
| SEQ ID N^{o} 3865 | Listeria monocytogenes 4b Contig994 |
| | Corresponding to the former SEQ ID n^{o} 1879 |
| | Corresponding to the former SEQ ID n^{o} 1924 |
| | Corresponding to the former SEQ ID n^{o} 1977 |
| | Corresponding to the former SEQ ID n^{o} 1993 |
| SEQ ID N^{o} 3866 | Listeria monocytogenes 4b Contig995 |
| | Corresponding to the former SEQ ID n^{o} 1390 |
| | Corresponding to the former SEQ ID n^{o} 1834 |
| | Corresponding to the former SEQ ID n^{o} 1876 |
| SEQ ID N^{o} 3867 | Listeria monocytogenes 4b Contig996 |
| | Corresponding to the former SEQ ID n^{o} 1192 |
| | Corresponding to the former SEQ ID n^{o} 1591 |
| | Corresponding to the former SEQ ID n^{o} 1712 |
| SEQ ID N^{o} 3868 | Listeria monocytogenes 4b Contig997 |
| | Corresponding to the former SEQ ID n^{o} 1964 |
| | Corresponding to the former SEQ ID n^{o} 2032 |
| SEQ ID N^{o} 3869 | Listeria monocytogenes 4b Contig998 |
| | Corresponding to the former SEQ ID n^{o} 1287 |
| | Corresponding to the former SEQ ID n^{o} 1430 |
| | Corresponding to the former SEQ ID n^{o} 1678 |
| | Corresponding to the former SEQ ID n^{o} 1902 |
| | Corresponding to the former SEQ ID n^{o} 1940 |
| SEQ ID N^{o} 3870 | Listeria monocytogenes 4b Contig999 |
| | Corresponding to the former SEQ ID n^{o} 1357 |
| | Corresponding to the former SEQ ID n^{o} 1646 |
| | Corresponding to the former SEQ ID n^{o} 1887 |
| | Corresponding to the former SEQ ID n^{o} 1995 |
| SEQ ID N^{o} 3871 | Listeria monocytogenes 4b Contig1000 |
| | Corresponding to the former SEQ ID n^{o} 1202 |
| | Corresponding to the former SEQ ID n^{o} 1724 |
| | Corresponding to the former SEQ ID n^{o} 2036 |
| SEQ ID N^{o} 3872 | Listeria monocytogenes 4b Contig1001 |
| | Corresponding to the former SEQ ID n^{o} 2039 |
| SEQ ID N^{o} 3873 | Listeria monocytogenes 4b Contig1002 |
| | Corresponding to the former SEQ ID n^{o} 1113 |
| | Corresponding to the former SEQ ID n^{o} 1429 |
| | Corresponding to the former SEQ ID n^{o} 1600 |
| | Corresponding to the former SEQ ID n^{o} 1956 |
| SEQ ID N^{o} 3874 | Listeria monocytogenes 4b Contig1003 |
| | Corresponding to the former SEQ ID n^{o} 1214 |
| | Corresponding to the former SEQ ID n^{o} 1817 |
| SEQ ID N^{o} 3875 | Listeria monocytogenes 4b Contig1004 |
| | Corresponding to the former SEQ ID n^{o} 1249 |
| | Corresponding to the former SEQ ID n^{o} 1378 |
| | Corresponding to the former SEQ ID n^{o} 1463 |
| | Corresponding to the former SEQ ID n^{o} 1708 |
| | Corresponding to the former SEQ ID n^{o} 1749 |
| SEQ ID N^{o} 3876 | Listeria monocytogenes 4b Contig1005 |
| | Corresponding to the former SEQ ID n^{o} 1544 |
| | Corresponding to the former SEQ ID n^{o} 1723 |
| | Corresponding to the former SEQ ID n^{o} 1738 |
| | Corresponding to the former SEQ ID n^{o} 2015 |
| SEQ ID N^{o} 3877 | Listeria monocytogenes 4b Contig1006 |
| | Corresponding to the former SEQ ID n^{o} 1516 |
| | Corresponding to the former SEQ ID n^{o} 1746 |
| | Corresponding to the former SEQ ID n^{o} 1830 |
| SEQ ID N^{o} 3878 | Listeria monocytogenes 4b Contig1007 |
| | Corresponding to the former SEQ ID n^{o} 1467 |
| | Corresponding to the former SEQ ID n^{o} 1806 |
| | Corresponding to the former SEQ ID n^{o} 1811 |
| | Corresponding to the former SEQ ID n^{o} 1837 |
| SEQ ID N^{o} 3879 | Listeria monocytogenes 4b Contig1008 |
| | Corresponding to the former SEQ ID n^{o} 1644 |
| | Corresponding to the former SEQ ID n^{o} 1702 |
| | Corresponding to the former SEQ ID n^{o} 1990 |
| | Corresponding to the former SEQ ID n^{o} 1996 |
| SEQ ID N^{o} 3880 | Listeria monocytogenes 4b Contig1009 |
| | Corresponding to the former SEQ ID n^{o} 1565 |
| | Corresponding to the former SEQ ID n^{o} 1595 |
| | Corresponding to the former SEQ ID n^{o} 1918 |
| SEQ ID N^{o} 3881 | Listeria monocytogenes 4b Contig1010 |
| | Corresponding to the former SEQ ID n^{o} 1361 |
| | Corresponding to the former SEQ ID n^{o} 1478 |
| | Corresponding to the former SEQ ID n^{o} 1510 |
| | Corresponding to the former SEQ ID n^{o} 2006 |
| SEQ ID N^{o} 3882 | Listeria monocytogenes 4b Contig1011 |
| | Corresponding to the former SEQ ID n^{o} 1083 |
| | Corresponding to the former SEQ ID n^{o} 2037 |
| SEQ ID N^{o} 3883 | Listeria monocytogenes 4b Contig1012 |
| | Corresponding to the former SEQ ID n^{o} 1769 |
| | Corresponding to the former SEQ ID n^{o} 1835 |
| | Corresponding to the former SEQ ID n^{o} 1850 |
| | Corresponding to the former SEQ ID n^{o} 1867 |
| SEQ ID N^{o} 3884 | Listeria monocytogenes 4b Contig1013 |
| | Corresponding to the former SEQ ID n^{o} 1982 |
| | Corresponding to the former SEQ ID n^{o} 2035 |
| SEQ ID N^{o} 3885 | Listeria monocytogenes 4b Contig1014 |
| | Corresponding to the former SEQ ID n^{o} 1529 |
| | Corresponding to the former SEQ ID n^{o} 1581 |
| | Corresponding to the former SEQ ID n^{o} 1739 |
| | Corresponding to the former SEQ ID n^{o} 1865 |
| | Corresponding to the former SEQ ID n^{o} 1970 |
| SEQ ID N^{o} 3886 | Listeria monocytogenes 4b Contig1015 |
| | Corresponding to the former SEQ ID n^{o} 1170 |
| | Corresponding to the former SEQ ID n^{o} 1180 |
| | Corresponding to the former SEQ ID n^{o} 1265 |
| | Corresponding to the former SEQ ID n^{o} 1434 |
| | Corresponding to the former SEQ ID n^{o} 1536 |
| | Corresponding to the former SEQ ID n^{o} 1548 |
| | Corresponding to the former SEQ ID n^{o} 1877 |
| SEQ ID N^{o} 3887 | Listeria monocytogenes 4b Contig1016 |
| | Corresponding to the former SEQ ID n^{o} 1219 |
| | Corresponding to the former SEQ ID n^{o} 1917 |
| | Corresponding to the former SEQ ID n^{o} 2040 |
| SEQ ID N^{o} 3888 | Listeria monocytogenes 4b Contig1017 |
| | Corresponding to the former SEQ ID n^{o} 1245 |
| | Corresponding to the former SEQ ID n^{o} 1821 |
| | Corresponding to the former SEQ ID n^{o} 1841 |
| | Corresponding to the former SEQ ID n^{o} 2004 |
| | Corresponding to the former SEQ ID n^{o} 2025 |
| SEQ ID N^{o} 3889 | Listeria monocytogenes 4b Contig1018 |
| | Corresponding to the former SEQ ID n^{o} 1317 |
| | Corresponding to the former SEQ ID n^{o} 1813 |
| | Corresponding to the former SEQ ID n^{o} 1991 |
| | Corresponding to the former SEQ ID n^{o} 2001 |
| | Corresponding to the former SEQ ID n^{o} 2029 |
| SEQ ID N^{o} 3890 | Listeria monocytogenes 4b Contig1019 |
| | Corresponding to the former SEQ ID n^{o} 1926 |
| | Corresponding to the former SEQ ID n^{o} 2041 |
| SEQ ID N^{o} 3891 | Listeria monocytogenes 4b Contig1020 |
| | Corresponding to the former SEQ ID n^{o} 1873 |

[0332] Table IX: Legends

[0333] SEQ ID Nos. 3892-4025: sequences of 134 Contigs derived from the assembly of 13 919 sequences of Listeria monocytogenes 4b after taking away the sequences of L.monocytogenes EGDe and of L. innocua Clip11262.

TABLE IX

| | |
|---|---|
| SEQ ID N° 3892 | Listeria monocytogenes 4b-specifique Contig6 |
| SEQ ID N° 3893 | Listeria monocytogenes 4b-specifique Contig7 |
| SEQ ID N° 3894 | Listeria monocytogenes 4b-specifique Contig8 |
| SEQ ID N° 3895 | Listeria monocytogenes 4b-specifique Contig9 |
| SEQ ID N° 3896 | Listeria monocytogenes 4b-specifique Contig10 |
| SEQ ID N° 3897 | Listeria monocytogenes 4b-specifique Contig11 |
| SEQ ID N° 3898 | Listeria monocytogenes 4b-specifique Contig12 |
| SEQ ID N° 3899 | Listeria monocytogenes 4b-specifique Contig13 |
| SEQ ID N° 3900 | Listeria monocytogenes 4b-specifique Contig14 |
| SEQ ID N° 3901 | Listeria monocytogenes 4b-specifique Contig15 |
| SEQ ID N° 3902 | Listeria monocytogenes 4b-specifique Contig16 |
| SEQ ID N° 3903 | Listeria monocytogenes 4b-specifique Contig17 |
| SEQ ID N° 3904 | Listeria monocytogenes 4b-specifique Contig18 |
| SEQ ID N° 3905 | Listeria monocytogenes 4b-specifique Contig19 |
| SEQ ID N° 3906 | Listeria monocytogenes 4b-specifique Contig20 |
| SEQ ID N° 3907 | Listeria monocytogenes 4b-specifique Contig21 |
| SEQ ID N° 3908 | Listeria monocytogenes 4b-specifique Contig22 |
| SEQ ID N° 3909 | Listeria monocytogenes 4b-specifique Contig23 |
| SEQ ID N° 3910 | Listeria monocytogenes 4b-specifique Contig24 |
| SEQ ID N° 3911 | Listeria monocytogenes 4b-specifique Contig25 |
| SEQ ID N° 3912 | Listeria monocytogenes 4b-specifique Contig26 |
| SEQ ID N° 3913 | Listeria monocytogenes 4b-specifique Contig27 |
| SEQ ID N° 3914 | Listeria monocytogenes 4b-specifique Contig28 |
| SEQ ID N° 3915 | Listeria monocytogenes 4b-specifique Contig29 |
| SEQ ID N° 3916 | Listeria monocytogenes 4b-specifique Contig30 |
| SEQ ID N° 3917 | Listeria monocytogenes 4b-specifique Contig31 |
| SEQ ID N° 3918 | Listeria monocytogenes 4b-specifique Contig32 |
| SEQ ID N° 3919 | Listeria monocytogenes 4b-specifique Contig33 |
| SEQ ID N° 3920 | Listeria monocytogenes 4b-specifique Contig34 |
| SEQ ID N° 3921 | Listeria monocytogenes 4b-specifique Contig35 |
| SEQ ID N° 3922 | Listeria monocytogenes 4b-specifique Contig36 |
| SEQ ID N° 3923 | Listeria monocytogenes 4b-specifique Contig37 |
| SEQ ID N° 3924 | Listeria monocytogenes 4b-specifique Contig38 |
| SEQ ID N° 3925 | Listeria monocytogenes 4b-specifique Contig39 |
| SEQ ID N° 3926 | Listeria monocytogenes 4b-specifique Contig40 |
| SEQ ID N° 3927 | Listeria monocytogenes 4b-specifique Contig41 |
| SEQ ID N° 3928 | Listeria monocytogenes 4b-specifique Contig42 |
| SEQ ID N° 3929 | Listeria monocytogenes 4b-specifique Contig43 |
| SEQ ID N° 3930 | Listeria monocytogenes 4b-specifique Contig44 |
| SEQ ID N° 3931 | Listeria monocytogenes 4b-specifique Contig45 |
| SEQ ID N° 3932 | Listeria monocytogenes 4b-specifique Contig46 |
| SEQ ID N° 3933 | Listeria monocytogenes 4b-specifique Contig47 |
| SEQ ID N° 3934 | Listeria monocytogenes 4b-specifique Contig48 |
| SEQ ID N° 3935 | Listeria monocytogenes 4b-specifique Contig49 |
| SEQ ID N° 3936 | Listeria monocytogenes 4b-specifique Contig50 |
| SEQ ID N° 3937 | Listeria monocytogenes 4b-specifique Contig51 |
| SEQ ID N° 3938 | Listeria monocytogenes 4b-specifique Contig52 |
| SEQ ID N° 3939 | Listeria monocytogenes 4b-specifique Contig53 |
| SEQ ID N° 3940 | Listeria monocytogenes 4b-specifique Contig54 |
| SEQ ID N° 3941 | Listeria monocytogenes 4b-specifique Contig55 |
| SEQ ID N° 3942 | Listeria monocytogenes 4b-specifique Contig56 |
| SEQ ID N° 3943 | Listeria monocytogenes 4b-specifique Contig57 |
| SEQ ID N° 3944 | Listeria monocytogenes 4b-specifique Contig58 |
| SEQ ID N° 3945 | Listeria monocytogenes 4b-specifique Contig59 |
| SEQ ID N° 3946 | Listeria monocytogenes 4b-specifique Contig60 |
| SEQ ID N° 3947 | Listeria monocytogenes 4b-specifique Contig61 |
| SEQ ID N° 3948 | Listeria monocytogenes 4b-specifique Contig62 |
| SEQ ID N° 3949 | Listeria monocytogenes 4b-specifique Contig63 |
| SEQ ID N° 3950 | Listeria monocytogenes 4b-specifique Contig64 |
| SEQ ID N° 3951 | Listeria monocytogenes 4b-specifique Contig65 |
| SEQ ID N° 3952 | Listeria monocytogenes 4b-specifique Contig66 |
| SEQ ID N° 3953 | Listeria monocytogenes 4b-specifique Contig67 |
| SEQ ID N° 3954 | Listeria monocytogenes 4b-specifique Contig68 |
| SEQ ID N° 3955 | Listeria monocytogenes 4b-specifique Contig69 |
| SEQ ID N° 3956 | Listeria monocytogenes 4b-specifique Contig70 |
| SEQ ID N° 3957 | Listeria monocytogenes 4b-specifique Contig71 |
| SEQ ID N° 3958 | Listeria monocytogenes 4b-specifique Contig72 |
| SEQ ID N° 3959 | Listeria monocytogenes 4b-specifique Contig73 |
| SEQ ID N° 3960 | Listeria monocytogenes 4b-specifique Contig74 |
| SEQ ID N° 3961 | Listeria monocytogenes 4b-specifique Contig75 |
| SEQ ID N° 3962 | Listeria monocytogenes 4b-specifique Contig76 |
| SEQ ID N° 3963 | Listeria monocytogenes 4b-specifique Contig77 |
| SEQ ID N° 3964 | Listeria monocytogenes 4b-specifique Contig78 |
| SEQ ID N° 3965 | Listeria monocytogenes 4b-specifique Contig79 |
| SEQ ID N° 3966 | Listeria monocytogenes 4b-specifique Contig80 |
| SEQ ID N° 3967 | Listeria monocytogenes 4b-specifique Contig81 |
| SEQ ID N° 3968 | Listeria monocytogenes 4b-specifique Contig82 |
| SEQ ID N° 3969 | Listeria monocytogenes 4b-specifique Contig83 |
| SEQ ID N° 3970 | Listeria monocytogenes 4b-specifique Contig84 |
| SEQ ID N° 3971 | Listeria monocytogenes 4b-specifique Contig85 |
| SEQ ID N° 3972 | Listeria monocytogenes 4b-specifique Contig86 |
| SEQ ID N° 3973 | Listeria monocytogenes 4b-specifique Contig87 |
| SEQ ID N° 3974 | Listeria monocytogenes 4b-specifique Contig88 |
| SEQ ID N° 3975 | Listeria monocytogenes 4b-specifique Contig89 |
| SEQ ID N° 3976 | Listeria monocytogenes 4b-specifique Contig90 |
| SEQ ID N° 3977 | Listeria monocytogenes 4b-specifique Contig91 |
| SEQ ID N° 3978 | Listeria monocytogenes 4b-specifique Contig92 |
| SEQ ID N° 3979 | Listeria monocytogenes 4b-specifique Contig93 |
| SEQ ID N° 3980 | Listeria monocytogenes 4b-specifique Contig94 |
| SEQ ID N° 3981 | Listeria monocytogenes 4b-specifique Contig95 |
| SEQ ID N° 3982 | Listeria monocytogenes 4b-specifique Contig96 |
| SEQ ID N° 3983 | Listeria monocytogenes 4b-specifique Contig97 |
| SEQ ID N° 3984 | Listeria monocytogenes 4b-specifique Contig98 |
| SEQ ID N° 3985 | Listeria monocytogenes 4b-specifique Contig99 |
| SEQ ID N° 3986 | Listeria monocytogenes 4b-specifique Contig100 |
| SEQ ID N° 3987 | Listeria monocytogenes 4b-specifique Contig101 |
| SEQ ID N° 3988 | Listeria monocytogenes 4b-specifique Contig102 |
| SEQ ID N° 3989 | Listeria monocytogenes 4b-specifique Contig103 |
| SEQ ID N° 3990 | Listeria monocytogenes 4b-specifique Contig104 |
| SEQ ID N° 3991 | Listeria monocytogenes 4b-specifique Contig105 |
| SEQ ID N° 3992 | Listeria monocytogenes 4b-specifique Contig106 |
| SEQ ID N° 3993 | Listeria monocytogenes 4b-specifique Contig107 |
| SEQ ID N° 3994 | Listeria monocytogenes 4b-specifique Contig108 |
| SEQ ID N° 3995 | Listeria monocytogenes 4b-specifique Contig109 |
| SEQ ID N° 3996 | Listeria monocytogenes 4b-specifique Contig110 |
| SEQ ID N° 3997 | Listeria monocytogenes 4b-specifique Contig111 |
| SEQ ID N° 3998 | Listeria monocytogenes 4b-specifique Contig112 |
| SEQ ID N° 3999 | Listeria monocytogenes 4b-specifique Contig113 |
| SEQ ID N° 4000 | Listeria monocytogenes 4b-specifique Contig114 |
| SEQ ID N° 4001 | Listeria monocytogenes 4b-specifique Contig115 |
| SEQ ID N° 4002 | Listeria monocytogenes 4b-specifique Contig116 |
| SEQ ID N° 4003 | Listeria monocytogenes 4b-specifique Contig117 |
| SEQ ID N° 4004 | Listeria monocytogenes 4b-specifique Contig118 |
| SEQ ID N° 4005 | Listeria monocytogenes 4b-specifique Contig119 |
| SEQ ID N° 4006 | Listeria monocytogenes 4b-specifique Contig120 |
| SEQ ID N° 4007 | Listeria monocytogenes 4b-specifique Contig121 |
| SEQ ID N° 4008 | Listeria monocytogenes 4b-specifique Contig122 |
| SEQ ID N° 4009 | Listeria monocytogenes 4b-specifique Contig123 |
| SEQ ID N° 4010 | Listeria monocytogenes 4b-specifique Contig124 |
| SEQ ID N° 4011 | Listeria monocytogenes 4b-specifique Contig125 |
| SEQ ID N° 4012 | Listeria monocytogenes 4b-specifique Contig126 |
| SEQ ID N° 4013 | Listeria monocytogenes 4b-specifique Contig127 |
| SEQ ID N° 4014 | Listeria monocytogenes 4b-specifique Contig128 |
| SEQ ID N° 4015 | Listeria monocytogenes 4b-specifique Contig129 |
| SEQ ID N° 4016 | Listeria monocytogenes 4b-specifique Contig130 |
| SEQ ID N° 4017 | Listeria monocytogenes 4b-specifique Contig131 |
| SEQ ID N° 4018 | Listeria monocytogenes 4b-specifique Contig132 |
| SEQ ID N° 4019 | Listeria monocytogenes 4b-specifique Contig133 |
| SEQ ID N° 4020 | Listeria monocytogenes 4b-specifique Contig134 |
| SEQ ID N° 4021 | Listeria monocytogenes 4b-specifique Contig135 |
| SEQ ID N° 4022 | Listeria monocytogenes 4b-specifique Contig136 |
| SEQ ID N° 4023 | Listeria monocytogenes 4b-specifique Contig137 |
| SEQ ID N° 4024 | Listeria monocytogenes 4b-specifique Contig138 |
| SEQ ID N° 4025 | Listeria monocytogenes 4b-specifique Contig139 |

1. A method for identifying nucleotide sequences specific for the genome of a strain of bacterium of the genus Listeria, in particular specific for a strain of L. innocua or L. monocytogenes, such as the strain L. monocytogenes EGDe or L. monocytogenes 4b.

2. The method for identifying nucleotide sequences as claimed in claim 1, characterized in that the sequences specific for:
L. innocua compared to L. monocytogenes, in particular compared to L. monocytogenes EGDe and/or L. monocytogenes 4b;
L. monocytogenes, in particular L. monocytogenes EGDe or L. monocytogenes 4b, compared to L. innocua;
L. monocytogenes EGDe compared to L. innocua and/or L. monocytogenes 4b; or
L. monocytogenes 4b compared to L. innocua and/or L. monocytogenes EGDe are identified.

3. The method for identifying nucleotide sequences as claimed in claim 1 or 2, characterized in that it comprises at least the following steps:
a) aligning the nucleotide sequences of L. monocytogenes, in particular those of L. monocytogenes EGDe and/or L. monocytogenes 4b, and those of L. innocua as claimed in claims 5 to 8, 10 to 17 and 21; and
b) processing the data obtained with this alignment in order to isolate said specific sequences.

4. The method for identifying nucleotide sequences as claimed in one of claims 1 to 3, characterized in that the nucleotide sequences specific for L. innocua or L. monocytogenes, in particular those for L. monocytogenes EGDe and/or L. monocytogenes 4b, hybridize, under high stringency conditions, with respectively the nucleotide sequences, or the sequence complementary thereto, of L. innocua or L. monocytogenes, in particular those of L. monocytogenes EGDe and/or L. monocytogenes 4b.

5. A nucleotide sequence derived from Listeria innocua, characterized in that it corresponds to a sequence chosen from SEQ ID No. 1 to SEQ ID No. 11, SEQ ID No. 2057 and SEQ ID No. 2058.

6. A nucleotide sequence derived from Listeria innocua, characterized in that it is chosen from
a) a nucleotide sequence comprising at least 75% identity with a sequence chosen from SEQ ID No. 1 to SEQ ID No. 11, SEQ ID No. 2057 and SEQ ID No. 2058;
b) a nucleotide sequence which hybridizes, under high stringency conditions, with a sequence chosen from SEQ ID No. 1 to SEQ ID No. 11, SEQ ID No. 2057 and SEQ ID No. 2058;
c) a nucleotide sequence complementary to a sequence chosen from SEQ ID No. 1 to SEQ ID No. 11, SEQ ID No. 2057 and SEQ ID No. 2058, or complementary to a nucleotide sequence as defined in a) or b), or a nucleotide sequence of the RNA corresponding to either of the sequences a) and b);
d) a nucleotide sequence of a representative fragment of a sequence chosen from SEQ ID No. 1 to SEQ ID No. 11, SEQ ID No. 2057 and SEQ ID No. 2058, or of a representative fragment of a nucleotide sequence as defined in a), b) or c);
e) a nucleotide sequence comprising a sequence as defined in a), b), c) or d); and
f) a nucleotide sequence as defined in a), b), c), d) or e) which has been modified.

7. The nucleotide sequence as claimed in claim 6, characterized in that it is a sequence derived from a sequence chosen from SEQ ID No. 1 to SEQ ID No. 11, SEQ ID No. 2057 and SEQ ID No. 2058, and in that it encodes a polypeptide, said nucleotide sequence preferably being chosen from the sequences SEQ ID No. 12 to SEQ ID No. 689, SEQ ID No. 2053 to SEQ ID No. 2056 and SEQ ID No. 2059 to SEQ ID No. 2601.

8. A nucleotide sequence characterized in that it comprises a nucleotide sequence chosen from:
a) a nucleotide sequence as claimed in claim 7;
b) a nucleotide sequence comprising at least 75% identity with a nucleotide sequence as claimed in claim 7;
c) a nucleotide sequence which hybridizes, under high stringency conditions, with a nucleotide sequence as claimed in claim 7;
d) a complementary or RNA nucleotide sequence corresponding to a sequence as defined in a), b) or c);
e) a nucleotide sequence of a representative fragment of a sequence as defined in a), b), c) or d); and
f) a sequence as defined in a), b), c), d) or e) which has been modified.

9. A polypeptide encoded by a nucleotide sequence as claimed in one of claims 6 to 8.

10. The polypeptide as claimed in claim 9, characterized in that it is chosen from the polypeptides encoded by a sequence chosen from SEQ ID No. 12 to SEQ ID No. 689, SEQ ID No. 2053 to SEQ ID No. 2056 and SEQ ID No. 2059 to SEQ ID No. 2601.

11. A polypeptide characterized in that it comprises a polypeptide chosen from:
a) a polypeptide as claimed in either of claims 9 and 10;
b) a polypeptide exhibiting at least 80% identity with a polypeptide as claimed in either of claims 9 and 10;
c) a fragment of at least 5 amino acids of a polypeptide as claimed in either of claims 9 and 10 or as defined in b);
d) a biologically active fragment of a polypeptide as claimed in either of claims 9 and 10 or as defined in b) or c); and
e) a polypeptide as claimed in either of claims 9 and 10 or as defined in b), c) or d) which has been modified.

12. A nucleotide sequence encoding a polypeptide as claimed in claim 11.

13. A nucleotide sequence encoding a polypeptide specific for L. innocua characterized in that it is chosen from SEQ ID No. 12 to SEQ ID No. 689 and SEQ ID No. 2059 to SEQ ID No. 2601.

14. A nucleotide sequence derived from Listeria monocytogenes serotype 4b, characterized in that it corresponds to a sequence chosen from SEQ ID No. 1068 to SEQ ID No. 2041 and SEQ ID No. 2872 to SEQ ID No. 3891.

15. A nucleotide sequence derived from Listeria monocytogenes serotype 4b, characterized in that it is chosen from:
a) a nucleotide sequence comprising at least 75% identity with a sequence chosen from SEQ ID No. 1068 to SEQ ID No. 2041 and SEQ ID No. 2872 to SEQ ID No. 3891;
b) a nucleotide sequence which hybridizes, under high stringency conditions, with a sequence chosen from SEQ ID No. 1068 to SEQ ID No. 2041 and SEQ ID No. 2872 to SEQ ID No. 3891;
c) a nucleotide sequence complementary to a sequence chosen from SEQ ID No. 1068 to SEQ ID No. 2041 and SEQ ID No. 2872 to SEQ ID No. 3891, or complementary to a nucleotide sequence as defined in a) or b), or a nucleotide sequence of the RNA corresponding to either of the sequences a) and b);
d) a nucleotide sequence of a representative fragment of a sequence chosen from SEQ ID No. 1068 to SEQ ID No. 2041 and SEQ ID No. 2872 to SEQ ID No. 3891, or of a representative fragment of a nucleotide sequence as defined in a), b) or c);
e) a nucleotide sequence comprising a sequence as defined in a), b), c) or d); and
f) a nucleotide sequence as defined in a), b), c), d) or e) which has been modified.

16. A nucleotide sequence as claimed in claim 15, characterized in that it is a sequence derived from a sequence chosen from SEQ ID No. 1068 to SEQ ID No. 2041 and SEQ ID No. 2872 to SEQ ID No. 3891, and in that it encodes a polypeptide, said nucleotide sequence preferably being chosen from the sequences SEQ ID No. 690 to SEQ ID No. 1067 and SEQ ID No. 2602 to SEQ ID No. 2871 and SEQ ID No. 2049 to SEQ ID No. 2052.

17. A nucleotide sequence characterized in that it comprises a nucleotide sequence chosen from:
a) a nucleotide sequence as claimed in claim 16;
b) a nucleotide sequence comprising at least 75% identity with a nucleotide sequence as claimed in claim 16;
c) a nucleotide sequence which hybridizes, under high stringency conditions, with a nucleotide sequence as claimed in claim 16;
d) a complementary or RNA nucleotide sequence corresponding to a sequence as defined in a), b) or c);
e) a nucleotide sequence of a representative fragment of a sequence as defined in a), b), c) or d); and
f) a sequence as defined in a), b), c), d) or e) which has been modified.

18. A polypeptide encoded by a nucleotide sequence as claimed in one of claims 15 to 17.

19. The polypeptide as claimed in claim 18, characterized in that it is chosen from the polypeptides encoded by a sequence chosen from SEQ ID No. 690 to SEQ ID No. 1067, SEQ ID No. 2049 to SEQ ID No. 2052 and SEQ ID No. 2602 to SEQ ID No. 2871.

20. A polypeptide characterized in that it comprises a polypeptide chosen from:
a) a polypeptide as claimed in either of claims 18 and 19;
b) a polypeptide exhibiting at least 80% identity with a polypeptide as claimed in either of claims 18 and 19;
c) a fragment of at least 5 amino acids of a polypeptide as claimed in either of claims 18 and 19 or as defined in b);
d) a biologically active fragment of a polypeptide as claimed in either of claims 18 and 19 or as defined in b) or c); and
e) a polypeptide as claimed in either of claims 18 and 19 or as defined in b), c) or d) which has been modified.

21. A nucleotide sequence encoding a polypeptide as claimed in claim 20.

22. A nucleotide sequence encoding a polypeptide specific for L. monocytogenes, characterized in that it is chosen from SEQ ID No. 690 to SEQ ID No. 1067, SEQ ID No. 2602 to SEQ ID No. 2871 and SEQ ID No. 3892 to SEQ ID No. 4025.

23. A nucleotide sequence encoding a polypeptide exhibiting at least 87% identity between L. innocua and L. monocytogenes, characterized in that it is chosen from SEQ ID No. 2049 to SEQ ID No. 2056.

24. The nucleotide sequence as claimed in one of claims 6 to 8, 12, 13, 15 to 17, and 21 to 23, characterized in that it encodes a polypeptide of L. innocua or L. monocytogenes, or one of its fragments:
involved in amino acid biosynthesis or in the biosynthesis of cofactors, prosthetic groups and transporters;
which is a cell envelope polypeptide or a polypeptide located at the surface of L. innocua or L. monocytogenes;
involved in the cellular machinery;
involved in central intermediate metabolism;
involved in energy metabolism;
involved in fatty acid and phospholipid metabolism;
involved in the metabolism of nucleotides, purines, pyrimidines or nucleosides;
involved in regulatory functions;
involved in the replication process;
involved in the transcription process;
involved in the translation process;
involved in the process of protein transport and binding;
involved in adaptation to atypical conditions;
involved in sensitivity to medicinal products and analogs; or
involved in functions relating to transposons.

25. The polypeptide as claimed in one of claims 9 to 11, and 17 to 20, characterized in that it is a polypeptide of L. innocua or L. monocytogenes:
involved in amino acid biosynthesis or in the biosynthesis of cofactors, prosthetic groups and transporters;
which is a cell envelope polypeptide or a polypeptide located at the surface of L. innocua or L. monocytogenes;
involved in the cellular machinery;
involved in central intermediate metabolism;
involved in energy metabolism;
involved in fatty acid and phospholipid metabolism;
involved in the metabolism of nucleotides, purines, pyrimidines or nucleosides;
involved in regulatory functions;
involved in the replication process;
involved in the transcription process;
involved in the translation process;
involved in the process of protein transport and binding;
involved in adaptation to atypical conditions;
involved in sensitivity to medicinal products and analogs; or
involved in functions relating to transposons.

26. A nucleotide sequence which can be used as a primer or as a probe, characterized in that its sequence is chosen from the nucleotide sequences as claimed in one of claims 6 to 8, 12 to 17, and 21 to 23.

27. The nucleotide sequence as claimed in claim 26, characterized in that it is labeled with a radioactive compound or with a nonradioactive compound.

28. The nucleotide sequence as claimed in either of claims 26 and 27, characterized in that it is immobilized on a support, covalently or noncovalently.

29. The nucleotide sequence as claimed in claim 28, characterized in that it is immobilized on a support such as a high density filter or a DNA chip.

30. The nucleotide sequence as claimed in one of claims 27 to 29, for detecting and/or amplifying nucleic acid sequences.

31. A DNA chip or filter, characterized in that it contains at least one nucleotide sequence as claimed in claim 29.

32. The DNA chip or filter as claimed in claim 31, characterized in that it also contains at least one nucleotide sequence of a microorganism other than L. innocua or L. monocytogenes, immobilized on the support of said chip.

33. The DNA chip or filter as claimed in claim 32, characterized in that the microorganism is chosen from a microorganism related to a L. innocua or L. monocytogenes, a bacterium of the genus Listeria and a variant of L. innocua or L. monocytogenes.

34. A kit or set for detecting and/or identifying bacteria belonging to the species L. innocua or L. monocytogenes or to a related microorganism, characterized in that it comprises a DNA chip or a filter as claimed in claim 31.

35. A kit or set for detecting and/or identifying a microorganism, characterized in that it comprises a DNA chip or a filter as claimed in either of claims 32 and 33.

36. A kit or set for detecting and/or identifying the expression of at least one gene of L. innocua or L. monocytogenes, characterized in that it comprises a DNA chip or a filter as claimed in either of claims 32 and 33.

37. A cloning and/or expression vector, characterized in that it contains a nucleotide sequence as claimed in one of claims 5 to 8, 12, 13, 15 to 17, and 21 to 23.

38. A host cell, characterized in that it is transformed with a vector as claimed in claim 37.

39. The host cell as claimed in claim 38, characterized in that it is a bacterium belonging to the genus Listeria.

40. The host cell as claimed in claim 39, characterized in that it is a bacterium belonging to the species L. innocua or L. monocytogenes.

41. A plant or an animal, except a human, comprising a transformed cell as claimed in one of claims 38 to 40.

42. A method for preparing a polypeptide, characterized in that a cell transformed with a vector as claimed in claim 37 is cultured under conditions which allow the expression of said polypeptide, and in that said recombinant polypeptide is recovered.

43. A recombinant polypeptide which can be obtained using a method as claimed in claim 42.

44. A method for preparing a synthetic polypeptide as claimed in one of claims 9 to 11, 18 to 20 and 25, characterized in that chemical synthesis of said polypeptide is carried out.

45. A hybrid polypeptide, characterized in that it comprises at least the sequence of a polypeptide as claimed in one of claims 9 to 11, 18 to 20, 25 and 43, and a sequence of a polypeptide capable of inducing an immune response in humans or animals.

46. A nucleotide sequence encoding a hybrid polypeptide as claimed in claim 45.

47. A vector characterized in that it contains a nucleotide sequence as claimed in claim 46.

48. A monoclonal or polyclonal antibody, its fragments, or a chimeric antibody, characterized in that it is capable of specifically recognizing a polypeptide as claimed in one of claims 9 to 11, 18 to 20, 25, 43 and 45.

49. The antibody as claimed in claim 48, characterized in that it is a labeled antibody.

50. A method for detecting and/or identifying bacteria belonging to the species L. innocua or L. monocytogenes, or to a related microorganism, in a biological sample, characterized in that it comprises the following steps:
a) bringing the biological sample into contact with an antibody as claimed in either of claims 48 and 49;
b) demonstrating the antigen-antibody complex possibly formed.

51. A method for detecting the expression of a gene of L. innocua or L. monocytogenes, characterized in that a strain of L. innocua or L. monocytogenes is brought into contact with an antibody as claimed in claim 74 or 75, and in that the antigen-antibody complex possibly formed is detected.

52. A kit or set for carrying out a method as claimed in claim 50 or 51, characterized in that it comprises the following elements:
a) an antibody as claimed in either of claims 48 and 49;
b) optionally, the reagents for constituting the medium suitable for the immunoreaction;
c) optionally, the reagents for demonstrating the antigen-antibody complexes produced by the immunoreaction.

53. The polypeptide as claimed in one of claims 9 to 11, 18 to 20, 25, 43 and 45, or the antibody as claimed in either of claims 48 and 49, characterized in that it is immobilized on a support, in particular a protein chip.

54. A protein chip, characterized in that it contains at least one polypeptide as claimed in one of claims 9 to 11, 18 to 20, 25, 43 and 45, or at least one antibody as claimed in either of claims 48 and 49, immobilized on the support of said chip.

55. The protein chip as claimed in claim 54, characterized in that it also contains at least one polypeptide of a microorganism other than L. innocua or L. monocytogenes or at least one antibody directed against a compound of a microorganism other than L. innocua or L. monocytogenes, immobilized on the support of said chip.

56. A kit or set for detecting and/or identifying bacteria belonging to the species L. innocua or L. monocytogenes, or to a related microorganism, characterized in that it comprises a protein chip as claimed in either of claims 54 and 55.

57. A kit or set for detecting and/or identifying a microorganism, characterized in that it comprises a protein chip as claimed in claim 56.

58. A method for detecting and/or identifying bacteria belonging to the species L. innocua or L. monocytogenes, or to a related microorganism, in a biological sample, characterized in that it uses a nucleotide sequence as claimed in one of claims 6 to 8, 12, 13, 15 to 17, 21 to 24, 26 to 30 and 46.

59. The method as claimed in claim 58, characterized in that it comprises the following steps:
a) optionally isolating the DNA from the biological sample to be analyzed, or obtaining a cDNA from the RNA of the biological sample;
b) specifically amplifying the DNA of bacteria belonging to the species L. innocua or monocytogenes 4b, or to a related microorganism, using at least one primer as claimed in one of claims 26 to 30;
c) demonstrating the amplification products.

60. The method as claimed in claim 58, characterized in that it comprises the following steps:
a) bringing a nucleotide probe as claimed in one of claims 26 to 30 into contact with a biological sample, the nucleic acid contained in the biological sample having, where appropriate, previously been made accessible to hybridization, under conditions which allow hybridization of the probe to the nucleic acid of a bacterium belonging to the species L. innocua or L. monocytogenes 4b, or to a related microroganism;
b) demonstrating the hybrid possibly formed between the nucleotide probe and the nucleic acid of the biological sample.

61. The method as claimed in claim 58, characterized in that it comprises the following steps:
a) bringing a nucleotide probe immobilized on a support as claimed in claim 28 into contact with a biological sample, the nucleic acid of the sample having, where appropriate, previously been made accessible to hybridization, under conditions which allow hybridization of the probe to the nucleic acid of a bacterium belonging to the species L. innocua or L. monocytogenes, or to a related microorganism;
b) bringing the hybrid formed between the nucleotide probe immobilized on a support and the nucleic acid contained in the biological sample, where appropriate after removing the nucleic acid of the biological sample which has not hybridized with the probe, into contact with a labeled nucleotide probe as claimed in claim 27;
c) demonstrating the new hybrid formed in step b).

62. The method as claimed in claim 61, characterized in that, prior to step a), the DNA of the biological sample or the cDNA optionally obtained by reverse transcription of the RNA of the sample is amplified using at least one primer as claimed in one of claims 26 to 30.

63. A kit or set for detecting and/or identifying bacteria belonging to the species L. innocua or L. monocytogenes, or to a related microorganism, characterized in that it comprises the following elements:
a) a nucleotide probe as claimed in one of claims 26 to 30;
b) optionally, the reagents required to carry out a hybridization reaction;
c) optionally, at least one primer as claimed in one of claims 26 to 30 and also the reagents required for a DNA amplification reaction.

64. A kit or set for detecting and/or identifying bacteria belonging to the species L. innocua or L. monocytogenes, or to a related microorganism, characterized in that it comprises the following elements:
a) a nucleotide probe, termed capture probe, as claimed in claim 28
b) an oligonucleotide probe, termed revealing probe, as claimed in claim 27;
c) optionally, at least one primer as claimed in one of claims 26 to 30 and also the reagents required for a DNA amplification reaction.

65. A kit or set for detecting and/or identifying bacteria belonging to the species L. innocua or L. monocytogenes, or to a related microorganism, characterized in that it comprises the following elements:
a) at least one primer as claimed in one of claims 26 to 30;
b) optionally, the reagents required to carry out a DNA amplification reaction;
c) optionally, a component for verifying the sequence of the amplified fragment, more particularly an oligonucleotide probe as claimed in one of claims 26 to 30.

66. The method as claimed in claims 50, 51 and 58 to 62 or the kit or set as claimed in claims 52, 56, 57 and 63 to 65, for detecting and/or identifying bacteria belonging to the species L. innocua or L. monocytogenes, characterized in that said primer and/or said probe are chosen from the nucleotide sequences as claimed in one of claims 6 to 8, 12, 13, 15 to 17, 21 to 24, 26 to 30 and 46, specific for the species L. innocua or L. monocytogenes, in that said polypeptides are chosen from the polypeptides as claimed in one of claims 9 to 11, 18 to 20, 25, 43 and 45, specific for the species L. innocua or L. monocytogenes, and in that said antibodies are chosen from the antibodies as claimed in either of claims 48 and 49, directed against the polypeptides chosen from the polypeptides as claimed in one of claims 9 to 11, 18 to 20, 25, 43 and 45, specific for the species L. innocua or L. monocytogenes.

67. A strain of L. innocua or L. monocytogenes, characterized in that it contains at least one mutation in at least one nucleotide sequence as claimed in one of claims 6 to 8, 12, 13, 15 to 17, and 21 to 24.

68. The strain of L. innocua or L. monocytogenes as claimed in claim 67, characterized in that the mutation leads to inactivation of the gene.

69. The strain of L. innocua or L. monocytogenes as claimed in claim 67, characterized in that the mutation leads to overexpression of the gene.

70. The use of a nucleotide sequence as claimed in one of claims 6 to 8, 12, 13, 15 to 17, and 21 to 24, of a polypeptide as claimed in one of claims 9 to 11, 18 to 20, 25, 43 and 45, of an antibody as claimed in either of claims 48 and 49, of a cell as claimed in one of claims 38 to 40, and/or of a transformed animal as claimed in claim 41, for selecting an organic or inorganic compound capable of modulating, regulating, inducing or inhibiting gene expression, and/or of modifying cell replication in eukaryotic or prokaryotic cells, or capable of inducing, inhibiting or worsening in an animal or human organism pathological conditions associated with an infection with L. monocytogenes or one of its related microorganisms.

71. A method for selecting a compound capable of binding to a polypeptide as claimed in one of claims 9 to 11, 18 to 20, 25, 43 and 45, capable of binding to a nucleotide sequence as claimed in one of claims 6 to 8, 12, 13, 15 to 17, and 21 to 24, or capable of recognizing an antibody as claimed in either of claims 48 and 49, and/or capable of modulating, regulating, inducing or inhibiting gene expression and/or of modifying cell replication of eukaryotic or prokaryotic cells, or capable of inducing, inhibiting or worsening in an animal or human organism pathological conditions associated with infection with L. monocytogenes, characterized in that it comprises the following steps:
a) bringing said compound into contact with said polypeptide, with said nucleotide sequence or with a transformed cell as claimed in one of claims 38 to 40, and/or administering said compound to a transformed animal as claimed in claim 41;
b) determining the ability of said compound to bind said polypeptide or said nucleotide sequence, or to modulate, regulate, induce or inhibit gene expression, or to modulate cell growth or replication, or to induce, inhibit or worsen in said animal or human organism pathological conditions associated with infection with L. monocytogenes or with a related microorganism.

72. A pharmaceutical composition comprising a compound chosen from the following compounds:
a) a nucleotide sequence as claimed in one of claims 6 to 8, 12, 13, 15 to 17, and 21 to 24;
b) a polypeptide as claimed in one of claims 9 to 11, 18 to 20, 25, 43 and 45;
c) a vector as claimed in claim 37 or 47;
d) an antibody as claimed in claim 48 or 49.

73. The composition as claimed in claim 72, optionally in combination with a pharmaceutically acceptable vehicle.

74. The pharmaceutical composition as claimed in either of claims 72 and 73, for preventing or treating an infection with a bacterium belonging to the species L. monocytogenes, or with a related microorganism.

75. An immunogenic composition, characterized in that it comprises one or more polypeptides as claimed in one of claims 9 to 11, 18 to 20, 25 and 43, and/or one or more polypeptides as claimed in claim 45.

76. The use of a cell as claimed in one or more of claims 38 to 40, or of a vector as claimed in either of claims 37 and 47, for preparing a vaccine composition.

77. A vaccine composition, characterized in that it contains a polynucleotide as claimed in one of claims 6 to 8, 12, 13, 15 to 17, and 21 to 24, a vector as claimed in either of claims 37 and 47, and/or a cell as claimed in one of claims 38 to 40.

78. An immunogenic composition capable of inducing a cellular or humoral immune response, for preventing or treating an infection with a bacterium belonging to the species L. monocytogenes, or with a related microorganism, characterized in that it comprises an immunogenic composition as claimed in either of claims 75 and 77, in combination with a pharmaceutically acceptable vehicle and, optionally, one or more suitable adjuvants of immunity.

79. A genomic library of a bacterium of the genus Listeria.

80. The genomic DNA library of a bacterium of the genus Listeria as claimed in claim 79, characterized in that the DNA library is cloned into a plasmid.

81. The genomic DNA library as claimed in claim 79 or 80, characterized in that said bacterium is L. innocua or L. monocytogenes serotype 4b.

82. The library as claimed in claim 79 or 80, characterized in that it is the Li-shotgun library deposited with the CNCM on Oct. 2, 2000, under the No. I-2565.

83. The library as claimed in claim 79 or 80, characterized in that it is the Lm4b-shotgun library deposited with the CNCM on Oct. 2, 2000, under the No. I-2566.

84. The genomic library as claimed in claim 79, characterized in that the bacterium is L. innocua or L. monocytogenes.

85. The use of the genomic library as claimed in one of claims 79 to 84, for isolating nucleotide sequences specific for L. innocua and L. monocytogenes, characterized in that the nucleotide sequences of L. innocua and L. monocytogenes are aligned and in that the data obtained with this alignment are processed in order to isolate said specific sequences.

86. The pharmaceutical composition as claimed in one of claims 72 to 74, characterized in that it comprises antibodies directed against polypeptides specific for L. innocua or L. monocytogenes.

87. A method for identifying sequences specific for L. innocua or L. monocytogenes, characterized by the alignment of the nucleotide sequences of L. monocytogenes and of those of L. innocua, as claimed in claims 5 to 8, 12 to 17 and 21, and the processing of the data obtained with this alignment in order to isolate said specific sequences.

The application's sequence listing, which the Patent Office published only in electronic form, follows.

SEQUENCE LISTING (4025 sequences)

SEQ ID NO: 1 - DNA, 3807 bp, Listeria innocua
gcacaataagtaactatgaaaattcatatagttcaccttcggcagaagttatatctatgcttgcagacgccttagagacaagcacagattatttactagaaaaaacagatgagattgaaattaaacagaaatattatgatcttactaagaaagatgaaaatgatattgaaaaagaattagaaaaaatcctcagtaatttagattcatcagacggtctagcattctcaggggaaccactggatgacgaaacaagagaactactttcaatatcattagaaagatcactcagattcgcaagacaagagtcaaaaagaaaattcactcccaaaaaatttagagataaagattctgattaaaatggagaattgaggtcttataatgacaatgtatgcgtggatgattgaaaaacaagatgacataataaaaaaatggaacactagaaatccttttgaaattgccgaattcctcgaaattgctatcttttttgaggatcttggtaacatgtacgggtattacaatatgaaaaaccgtattaaaatgattcatattaacgaaaatataactattgatgaacaaatattcacttgtgcacatgaattgcaacatgcaatatttcatgagcaggctaatacaccttttctatccgaacacacacttcagtctgtacagaaaatcgaaactcaagctaattttttagcaacaaggttattgattgcaaatagaaaaatagatggaatcaacacaaaaattgagttgttaagatattatgggatacctcttgagatggcgaggttcttataaaataatctaatttatatttaaagggagagttttttatgaagaagattttgttaagcgggttaattatttttactggtgtgattttgatcagttgcggagatcaaaaagaaactgaatcaactacaacaaaagataacgcagatgaacaaaaaattacaactgaagatattcaagttccagatgatgtaaaaaaagttgcaagtcaactaggagaagataagattcctacagaagatttgaaagtaacacaagataattattacatcgatggagaaaaaacaaatgttaatctagtaaaattgttaaacagtgaatctacatcaagtataaacgcaatattaaatagtgataacaaagcagcaaaagaatacaaatttaacggtagcaattcaggaactctcatgctattgctcgcagccgtaaacagcaaacttgatactcaagtctcgaaagaaatagtaaatgctaatgatactaatgaaagtgttgagaaagaactcagttcagacacaagcaatgtattattcaaatatgacccagcgagcgatgatcattctatgcatgctactattactttaaaataaagaatcgcccttctcgggcttttctttaaaaccaaaaacagaacgtatgtgctattaataactttgagaggatgaaagagaatggcaaagaacaaatggcaacccactaaacatttaggaatttatgaatacatgactaaaaaaggaaagcgttatgggatacgagttcgttataagcaaggtaatgattatcctgaaataaataaatctggttttgagacaattgcagctgcaaaagtttataaaaacaacattgaaaatttgaaagctaataaaaaagaatatgtttttacaaatgaaaaattaacattaaatacttggtttgcttcttacatggaaatgtttaaaaagaaaaacaaaagtaaagacacaatagcgaataaatatagtatttataataatcacttagaaatcccttttggtaattactatttaactgatataagtttagatatttacgaagactttttgcgcgaaaaaattaaaaatggatacgcaaacaactcagtcaaagcgatgcataaattaatgaaaagcattttaaacgctgctgttagatatgagaaactagaaaaaaacagacttcaatttgctgaaatagagcaattagaagaaaatgaagttattgagcttaaggtattagaaacagatgagtttaatgtatttatatcagcttgtagagcattttttactaaatatgattttacaatgatttatcttgcagtttgggggatgcgtcgcggtgaagttatgggggtaaaacttaaaaatcttacttttgatgatgctaaacaacaagtacgtattacactagattccactcgaacccttcgtactcccgagggaaaaggtacgaaaacaccagctggtagaagaatattactaatagacggcgaaggttatcgactacttaaatattcggtagaaaaagcggttagcattgctaaagaccatggatctgttttgcaccaggatgattttatttttagaaacccaacttctaatcgtccttgggcggttacgcgtatgaatgatttactacgaaaattagaaaaagaatacgacataaaagtttaccctcatctattacgccataactttaatactcaggcattattggctggagctaatagcaatgatttacgaaaatttattggccacaaaaacagtagcatgactgatcattattcacatgcgacagacgagggacgagaaaaattaatgaatacgatgaaagacagattgtcaggaatctagaaaattgtgggataaaaattaaatataaaaatatcccacaaaaaatcccacaatagtttgatattgtatgatattcaaatgaaatcaaaaaaataaaaaccccgtatttcctaagaaaatacggggttttgatatcatataaaatcaattaaaaattgacttattttttcacttggctcattacttcttcaacaaagttatcttcttttttctcgattccttcgcctacttcaaaacgtacgaatgatacaacttttccgccgctttgttttacgtattcgccaacagtgatgtctgggtttttaacaaatggttggtcttctaaagaaatttcgcttagatattttttcaaacgaccttctaccattttttcaacgatattagctggtttgccttcgtttaatgcttgttgagttaatacttctttttcgtgttcaacttcttcagtagaaacgtcttcacgagaaatgtatttaggattgattgcagcgatgtgcattgcaacatcttttgcaactgtagtgtcagtagttccttcaagaagtgtaagaacaccaatacgtccgttcatgtggatgtattcgccgaaagcagagttgtccgctttttctttaacttcaaaacgacgaagggaaatgttttcaccgatttttgtaattgcttcagtgatgtagtcttgaacagtttgaccattaggcatttctgttttaagcgcatcttctaagctatctggacgtacttcaagaatttgtttagctagtgcatcaactaattgttggaagttgtcgtttttagcaacgaaatctgtttcagcatttacttcaagtactacagcatgtttttcattgctgattacatgagtcataccttcagaagcaacacgatcagattttttcgcagctttagcgattcctttttcacgaagatagtcaattgctttttccatatctccttcagtttctacaagcgcttttttacaatccatcataccagcgccagttttttcacgtaattcttttaccatttgagctgtaatattagccatttattttccctccaatttttctctttaaaaaaggtgataaagatagtgccttatcacccttgaagtttcaaataaaatcttatgcttcagtaatttcttctgcagctttttcttctacat

SEQ ID NO: 2 - DNA, 2631 bp, Listeria innocua
tttccagcctaaaggggggaaccccctacactaggccttttttgtttcgggggggcctcccgggatttaatccgtttggtcccccggttttggccctagggtcagttcaagccaaagaagtcccttttgccattggtgttcctccacatatttacgcatttcaccgctacacgtggaattccactctcttcttttgcactccagtcttccagtttccaatgaccctccccggttaagccgggggctttcacatcagacttaaaagaccgcctgcgcgcgctttacgcccaataaatccggacaacgcttgccacctacgtattaccgcggctgctggcacgtagttagccgtggctttctggttagataccgtcaagggacaagcagttactcttatccttgttcttctctaacaacagtactttacgatccgaaaaccttcttcatacacgcggcgttgctccgtcagactttcgtccattgcggaagattccctactgctgcctcccgtaggagtctgggccgtgtctcagtcccagtgtggccgatcaccctctcaggtcggctatgcatcgttgccttggtaggccattaccctaccaactagctaatgcaccgcgggcccatctgtaagcgatagccgaaaccatctttcaaaggcgtggcatgcgccacactctatcattcggtattagccccggtttcccggagttatccccaactcacaggcaggttgcccacgtgttactcacccgtccgccactaactttggaagagcaagctcttcctccgttcgttcgacttgcatgtattaggcacgccgccagcgttcgtcctgagccaggatcaaactctctttaaaatataaattgaatttgaatacttattcaacaccgtgaataagattccttgcgtcaaattgacttcgctagcaattaaattactagtttgtttttgttgaaaacagctttctgttttctgccctgcgattaccagtgagactttacgtctcattgcttttcgtcttcttctttgttcagttttcaaaggtcactttttcttcgttgccgtgtttagcagcaactcttatatcttactctatttctttgacaatgtcaacacattttcaaaaaaataattggtggagcctagcgggatcgaaccgctgacctcctgcgtgcaaagcaggcgctctcccagctgagctaaggccccattataaaagatgaaacaatcgggaagacaggattcgaacctgcgaccccttggtcccaaaccaagtgctctaccaagctgagctacttcccgtttaataaagtgcgcccaagaggagtcgaacctctaaccgcttgattcgtagtcaagtactctatccagttgagctatgggcgcatatgaaaataatgccgaggaccggaatcgaaccggtacggatatcactatccgcaggattttaagtcctgtgcgtctgccagttccgccaccccggcatattggaacttttgaaaacaagcggaagacggggttcgaacccgcgacccccaccttggcaaggtgatgttctaccactgaactacttccgcatatttataagtgcgggtgaagggacttgaacccccacgcctcgcggcgccagatcctaaatctggtgcgtctgccaattccgccacacccgcaaaagtgagccgtgctgggttcgaaccagcgaccctctgattaaaagtcagatgctctaccaactgagctaacggctctctacaataaaaatatgtattattataaagataatattaatggtgccggctgcaagagtcgaactcgcgacctactgattacaaatcagttgctctaccaactgagctaagccggcataaaaatggaggttaacgggatcgaaccgctgaccctctgcttgtaaggcagatgctctcccagctgagctaaacctccagaaataatattgcccggcagcgacctactctcgcagggggaagcccccaactaccattggcgcagagaagcttaactaccgtgttcgggatgggaacgggtgtgaccttctcgccataactaccagacaatatgaagttgttgaaagattgctctctcaaaactagagaagaaagggttcagttaggtaactttgtttcattttttggttaagtcctcgatcgattagtatttgtccgctccatgtatcgctacacttccactccaaacctatctacctgatcatctttcagggatcttactttccgaagaaatgggaaatctcatcttgaggggggcttcacgcttagatgctttcagcgtttatccctgccacacatagctacccagcgatgctcctggcggaacaactggtacaccagcggtgtgtccatcccggtcctctcgtactaaggacagctcctctcaaatttcctgcgcccgcgacggatagggaccgaactgtctcacgacgttctgaacccagctcgcgtgccgctttaatgggcgaacagcccaacccttgggaccgactacagccccaggatgcgacgagccgacatcgaggtgccaaacctccccgtcgatgtggactcttgggggagataagcctgttatccccggggtagcttttatccgttg

SEQ ID NO: 3 - DNA, 31702 bp, Listeria innocua
accttgaaagtttcaaataaaatctctatgcttcagtagtttcttctgcagctttttcttctacaggagcaacttccgcttcagttaactcttccccttggttcacttcaatgatagcgtcagccattttagcagttaaaagtttaaccgcacggatagcgtcatcatttgcagggattacgtagtcgatttcatccggatcacagtttgtatcaacaataccgatgataggaatatgaagtttacgagcttctgcaaccgcaatacgttctttgcgtgggtcaacgatgaataaagcatcaggaagacctttcatgtctttgattccgcctaagaagcgttctagtttttcttgttcttttttaagaaggactacttcttttttaggaaggacttcaaaagttccgtctgcttccattttttcgatttttttaaggtgttgaatacgtttttgaatagtttcaaagttagttaaagtaccacctaaccaacgatgattcacgaaatattgtccagaacggatagcttcgtcgcgaacggattcttgagcttgttttttagttcctacaaacaggatagttccgttgtcgctagctacttcacgcatgaagttgaaagcttcgtctacttttttcactgttttttgtaggtcaatgatataaataccatttctttctgtgaagatatatttcttcatttttgggttccaacggcgagtttggtggccgaagtgaactcctgcttcgagtaattgtttcattgaaataacaggcatgtgttattccctcctattggtttattttttgcggataaccgccctccgcatggatcaaccagctgaaaaacttaagcgaacaagcgccaagcaccttctcagtctgtcaccgtgcgtgtgtgatttaacaccgtttcctaatataccataaaaacgagaaatatgcaacctgtaatacagatcttcttcctaaactagtttttttcaacgataatctcaagttcttcggctaaactgagaacggcttgtttttttattcttttaaattgtgctatttcataaggtaattccatcattgtagcgatgtctttttgtttatcaatataacatttaattagaatgaaacgatgcagaggtttcatggtatttaatatctctgtatataattgaactaattttcctattgcagttatatcgctactgtcatctgttattaactttttttctactataccctcagaattaagttgtatcttgttcctaggtcctaaaaggaaaaccaaatactgaaactcctcaaaaaaacgttttacattttggacagttttaatgtagtctatactgtttttcattgctgacaccccgttttacattaatactagcaaaatattagctatatttgttatgcatgttgcttaaaattttccaaagaaaaaacgcttcaaaattagcaacaaagctcaatttcgaagcgtttctctaatcaattcgcaacaatatttacaagttttcctggaacgacgattactttacggatggtttttccgtctatgttttctttgattttatcgtcttcatgtgcgagtttctctagttcttcttttccgagtgactttgcaacggtgattttactttttactttgccatttacttgaagtacgatttctacttcatcttctactagttttgtttcatcgtatgttggccaagctacatagctaattgtttctgtatgaccaaggatttcccacaattcttctgcaaggtgtggtgcaattggggacaagagttgaacgaaaccttcaacatattgttttggaatcgtatctcgtttgtatgcttcattgatgaaaatcattagttgcgaaatcccggtattgaaacgcagattttcgtaatgattagtaactgttttcaccatatgatgatacgctttttctaaattagcattcgcatcggttgtaactttttcagcaagagtgccttcttcagttactagcaagcgccaaatacggtctaagaatttacgcgcaccttctagtccattttcattccaagcaatagaagcttccagtggtcccatgaacatttcgtacaagcgaagtgtgtctgcaccgtatttttctactacttcatcagggttaacgacattgcctcttgatttggacattttttcgttattttcgccaagaatcatgccttggttaaatagtttttggaaaggttcttttgttggaactacgccgatatcatacaagaatttatgccagaaacgtgcataaagaaggtgaagcactgcatgttctgccccgccgatataaacatctacaggaagccattctgctaatttttctttatcagcaattgcttcgctgttttttggatcgatatagcgcaagaaataccagcttgatccagcccattgtggcatcgtatttgtttcgcgacgaccttttcgaccgttttcgtctgttacgtttacccagtcatgcaagttggcaagtggtgattcgcctgttcctgatggtttgatttctgttgcttttggcagaagtagtggtagttcgtcttctggtacaagcgttgtttccccgtcttcccagtgaataactggaattggttcaccccagtaacgctgtctgctgaacaaccagtcgcgcaaacgatacgtgattttacggctaccgatgccttctttttctagccaatcaattgcagcggtaatcgcttcggctttagctagtccgttcaagaaatcagagttaatatgtggtccatcgccagtgaatgcttcttttgtcacgtcgccgccttcaagaacaggacgaatattcaaaccaaattgttgcgcaaattcaaagtcgcgttcatcgtgggctggtacggccataattgcacctgttccatattgaatcaacacgtagtccgcaatccaaattggcacttcttcaccgttgattggattaatcgcatatgctcctgtgaatacgcctgttttgtcttttgcaaggtcggttctttctagttcgctttttagttctacttgttttttataagcttcaactgcttctttttgctccggtgttgtgattttttcgataagttcgtgttctggtgcaaaaactgtatatgttgcgccaaaaagtgtatctgggcgtgttgtaaagacattaaacgtttcatcgctatctttaattttaaaagtaacttctgcgccttctgaacgaccaatccagttacgttgcatatctttaatattttcaggccagtctacaagttcaaggtcatctagcaaacgatctgcataggcagtaattttaagcatccattgacgcattggtttacggaaaactgggaagccaccgcgttcacttttgccatcgattacttcttcattggctagtacggttccaagtgccggacaccagtttacagcgatttcggcttcataagctaagccattttcatataatttttcaaaaatccactgtgtccatttataatattcaggatctgttgtattaatttcacgatcccaatcgtagaaaaaacccagagatttaatttggcgagtaaagttggcaatattcagtgcggtgaattcttctggatcgttaccagtatcaatcgcatattgctctgcaggaagtccaaatgcatcccaaccgattggatgaaggacgttcttcccttgcatgcgtttcattctagacaaaatatctgttgcagtatagccttctggatgtcctacgtgaagacctgctccagatgggtaaggaaacatatcaagtgcatagaagttttctttatctttatcttctgttgttttgaaagtgttatgttcactccaatattgttgccatttcggttccatttttttatgattaaatgtcactttactcatcctcttttccttaaaatatcgaattttggctacaaaaaaatccctacatcccaacggcttatcgccatgggacgagagatgcttctcccgcggtaccacccacattagtgtttaaccactcaacttaacaattccttaacgcggaaaacggggatacacccaagctccatggtaagttcatccggattttgtgactgacttgcaccaaccgtcagctctcttcacatcaaaatatgcagattactactccaattcatcgctatttcgcaaaattcattagtcttattgtagctgaatttaggttttttagcaagcggtctgaagatttatctaactttcgtagtaaaatgtgctaaaatgaatggagaatttcatttgaaggagtctaaaactagtgaaacaaacgaatccatttgtatatagtaatgataataaaagataccatacatggaactactgtttacgagaagaatttgggcaaaagacatataaagttgcgctcgatggtggttttgattgtccaaatcgtgatggcacagtagcgcatggcggttgtacattttgtagtgcggcaggttctggagattttgccgggaatcgagcgcttgatttaaaagtacaattccagcaagtgcgcgacaaaatgcaaacgaaatggaaagacgggaaatgtattgcttacttccaggcttttactaacactcatgcccctgttgctgaactgcgcgagaaatttgaaacggttttgaatgagcctggagtggttgggctttcgattgcgacacgacctgactgtttgccggatgatgtcgttgaatacttggctgaattaaatgaacggacttatttatggttagagcttggtttacaatctgctcacgatgaaactgggcgcttaattaaccgcgcgcatgactatgattgttatttagaaggcgtgcgcaaactgcaaaaacataatatccgcatttgtacccacattattaatggtcttccgaaagaaacgccggaaatgatgatggaaaccgcacaaaaagtagttgaaagtggcgttgatggtattaaaatccatttactccatttattaaaaggaacgccaatggtagaagattataaaaaaggtgacttagaatttttaacccgtgatggttatgtgaacttagtggctgaccaactcgaaattctgcctcctgaaatggttattcaccgaattacaggtgatggtggcgtggatgacttaattggaccagtttggagtttaaataagtttgaagtactgaatgccattgatgcagaactcgttcgaagagatagttggcaagggaaactatatcaacctgtggaagtgagttccaaatgaatttacgtggtattctccccttcgctcatgacacacttcgaaaagtagttcgctctggagattatgtaattgatgcaacatgtggcaacgggcatgatacacttttactagcagaacttgtgggtgtaaatggtcatgtgctcgggtttgatattcaacaaatggcaattgatgcaacgaaaactcgtttagaaaatgcgggtgtcgcatcacaagtagagctcgtatgtgctagccatgcgcttattccagaatatgcaacaaaacctgttcgcgctgctattttcaatctcggctacttgccaggtggcgataaagaaattacgacaaccgctgattctacgttagaaagcattggccatttaatgcagctactcgaagttggtggcgtcattattattgtaatttatcacggtcatccagctggaaaagtcgaaaaagatgctgtcttgactttttgtgaagcgattccacaacaagatttccacgttttatcttataactttatcaatcaaaaaaatgatgccccattcgtcattatcatcgaaaaaagaaaacctagacaaagctagtaattagcctgtctaggttttctttttattttccaaaatcgtatttatctgctacgtatacatcataccaaatcataaagataacaactgtccagattttacgactgtaatcgaatttaccggcacagtgatcgtctagtaagcctagaacgtattgtttgttaattaaatgatcggttggtgattctttaatgatatttttaacccaagcgttcatttcgtcttttagccagtgacgaattggtactgggaatcctagtttacggcgattaagtacgtgttctggtacaaaagtggctgccgctttacgtaagatgtatttggttgttccattggttgttttcattgtatctggaatatttcttgctacattgtacacttctttatcaaggaaaggtacacgaacttccagtgaattagccatcgtcatccggtcagcttttaggagaatatctccacgtagccacgtatgaatatcaatatactgcattctttctacaggatgataattcttagtttctgcataaaatggatccgtaatgttcgtataatcatgaccagattggtatttcggaagtaaaatttgtttttctttttctgtgaacattttggcgtttccgatgtaacgttcttccatcggtgttgttccgcgttctaagaaacttttaccacgcattccttctggcataatacgcgccacgctatttaacattgatttaaatacgcctggcattttgttaaacatcgcaagggaatttggttcgttataaatgttataaccgccaaaaagttcatctgcgccctcacctgataatgctactgttacttgtttacgcgcttctcttgataagaaataaagcggaatagcagccggatcagcaagtgggtcatccatatgccaaacaatttttggtaattctttcatatattcttccggtgagataacataactaatattttctacaccaagcttatctgctgtttcttttgctacatcgatttcactgaaaccatcgcgttcaaaaccaacagaaaatgttttaattgcaggatggtattctttggcaatcgccgcaataatcgatgaatcaataccgccagataggaatgaaccaactggtacatcggagcgcatatgcatttttacagaatcatacattacgtcacgcacttctttaatccatgcgtcttctgatttagttactggtgcaaaagatgctttccaataagtagtaatttccattggttgaccaattttcttcgtgaactgatgtcctggttctaagcgttttacatttttagttaaggaatctggttctggaacgaattgataagtcatgtagttttgtaatgaaacttcatctagttctttttcttttaaagcatgtaaaatggatttcttttcagaacccataaatagcttaccgtcttcttctgcatagaaaaatggtttaatgccgaatgggtcgcgtgcgccgtaaacaagttcttcttgtttatcccaaataacaaaaccaaacatcccacgaagacgttctgctgttttttctttgtatttcgcatatgtagcgataattacttctgtatcactttcggtttcaaatgtcattccttcagcaactaattgctcgcggagttccacatagttataaacttctccattaaaaataatccagtaacgttcattttcatacgttaacggttgatgaccgttttctacatcaataatacttaaacggcggaaaccaaactgcacgtgatcatctgtgaagtatccttcatcatctggcccacggtgcgtaatcatactggtcatttgtctaaaggtttctttatcagcgccagtaatttctgtaatgcggtcatgtacgcatcctacaaatccacacatggtaacatttctcctctatatagataatcattttatctttttttcacaacgtctatcatatcataactaggctttctttgcactgttaggaaaagaaaaaaccgaacatttctcacaaaaaatgttcggttaagcttattttacgattaatttttttaagcgcttctgctttatccgttctttcccaaggtaaatcaaggtcgctacggccaaaatgaccaaatgcagctgtttgacgataaattggacgacgtagatcaagcatatggattatcccagctgggcgtaagtcaaatagctcattaacaccatcaattaattcttgttctgaatagtcacttgttccatatgtgtcaatcgaaatggaaactggacgcgcaactccgatggcatatgcaacttgtacttctacttttttagcaagtccagcagcaacgatatttttagcgacatatcttgcagcataagcacccgaacggtctactttggttggatctttaccagaaaatgctcccccgccgtgacgcgcataaccaccgtatgtatccacgataattttacggccagtaagtccagcatcgccaagtggtccaccaataacaaagcggccagttggattaataaagtatttcgtattttcatctaagaaagaagcatcaattacttctgggaatagatgtgtgtgtaaatctttcgcgatttgttcttgtgtgatgtcaggatgatgttgcgttgaaacaacaattgtatcaatgcgaacaggttgattaaattcatcatattctacggttacttgggttttcgcatctggtcgtaaataatctaatttattcgttttgcgtaattctgttaacttgcgtgccaagccatgtgccaaaaagattggtagtggcattaactcttctgtttcatctgtagcaaaaccaaacatcaaaccttgatctcctgctccaattgcttcaatagcagcatcaatttcgctgccacttcttgattctagtgcctcgtccacaccttgcgcaatatctggtgattgttcgtcaatagccgttaaaacagcacatgtctctgcatcaaaaccatattttgctcgagtatagccgatttctttaatagtatcacgaacgattttaggaatatctacatatacagaagtagtaatctcacctgctactaaaactaaaccagttgtcacagtagtctcacaagcgacacgtgcgtccggatcttttgaaataattgcatctaaaattgcatcagatatttgatctgcaattttatctggatgtccatcagaaaccgattccgatgtaaatagatgacggtttttagccaattttattttcctcctttagttctctccaaatacgtctcatataaaaagcctctctctattttgcacgaaacgcgcacgaatagagaaaggctataattatacctttgctctcatcgttcaggagatattactcctgcaacagattagcacctttcacttatatgtgtaggttgctgggcttcaaagggtcagtccctctaccgctctggataagagataaattttaattctaagatagaataccataaactgaggctatatgcaataaaaattcggttttgtcttgatttccatttgcaaaaaacagtaaaaaagtgccttcctttatttttcacttatcattatttccatcctgtggtatgatagatggataaaaaagatgttttacttatctaaaggagattgtatctatgagtttaattacgttatccttgattatttttcttgggtttttagccgttgtatgtttatttgattttgtttttcgttggtattggtttaaatatttcttagcaacaatgggattaattgcaagtggtgtggtatttttcatcagtttttacggtggtgggatgtcacaaacagaaatcgctattgctatttttattggttcatttggtgaatatgtcgtatcacttattattagcctagttcgctttatttccaaaaaatcaaaaaaacctaaacaaaagaaaaaagtcaaaacagcttaaaaaactagctacgttaaaagatgagaatctttaatgtagctagtttttttatggataattttaaatctaaagcaagtcgaaagctttacggataacttccgccgaatgttcaaaattagtttgttcttctttagttagtggtggttttatcgtatctagaaccccatttgctccaataagcgctggttgtccgatatatgtatttgtttgttctgaaaaaacagctaacggaaatacttgtttcgcatctgttaaaagagcatcaacaattcccgctgtggcagtagcaattccaaaactcgtccaacctttacccgttaaaatattccagccaccgccgcgtactgcatcttttaaagcaggtaaatcaagcggtgtcttcgttttataatcagtgatattgacgccaccgattttcacagtcgaccacgcaacaaattgtgattcaccatgctcgccaagaacgtaaccttcgatgctttttggattaatatgtaaagcttctccaactactcttctcattctagcagtatcaagcgatgtccctgttccaaatacacgggaatgatcaaaaccagatattttttgaataagcatggtaataacatcacacggattagtaatattcacaaaaatccctttaaaacctgtcgctaaaattttcggcacaatctccgttaccgaacgacttgtttcaacgagttcttccatacgatcttctcgtagtaatgtttccggaccaacagccatcacaataatatctgcatctgaaagagcttcccagctattcgctgtaatggttgtataggaacgagtcatcgatgccatatcgcgtaactcaagcgcttcactttctgcttttgcttctattttatctattataacgatttcatcacaaatcccttgcgtaacaagagaaaaagccacgtcgcttccaacatgaccagcaccaattataccaactttgcgtttcaaaaaatcccctccacaattagttacttgaatttaaagcgattaattcatatttaatgatggttttattattttcccatacaagtttgcgcggaattgcttctccaagtgtttcgccttcttttgttttacgaacagcaattggaacatcaattggataaatccggtaacctactttttccagttcaaagaaattatctgaaattcttttttcatttccctttgttacgatcattgtgtttacctcaagtggcatacccaattttctcacctccagtttcttttatcatagcagaaattaccctggtttgactagtttttatcgtttaaaatccgctcagcccgcttaacaatttgccccattccagcatcacgcataaaaaaactaaatgccggttgcaaaataaacttactaagtgttcctttcacaacaactggaccttttgtttctaagtagttttgttgccttgttattgaaacaatctttgctgtataaacccgtttagtaaaagttcgttccttagattcaactaaataatccgcaacaaaatgaaatccttcagctactgcaccagtttcttccattagttctcggcgggctgccacaagactagtctcgcccggctctcctttaccaccggggaattcgagaccgcgaattttatgttccgtaaaaagccaaccatcgtcaattttaggaataatgagtacgtcatctggatttttcccttgttcttcaaaataaatggtcactttattgcctaaagtatctttataaataaacaaaaactcacttccttttcttttttcaaaaatatggtaagctgttagtaagatgaattttagaggatgaatattaatgaaaaaaatgcttatcggaggaatccgactttatcaaaaatatatctctcgtttcactccggctacgtgtcgtttttatccgacctgttctgcttacggaattgaagcgatagaaacacatggcgccctaaaaggaagttatctcgcaattagacgtatttccaaatgccacccttttcataaaggtggacttgatttcgtaccacctaaaaaagataaaaatgatgattctggccatacttgtaaagcccatcatcaccattaataatagcatgaatcggtttataccggttcattttttcttgctttttctgaaataataaggtattatcaaattcggactataaatcgtaattgctacgattagtatactatttaaacaagaacaatttcgatttagaggagtgaatggattgaaaaaaagttatcttcttgctttaacagcattattatccgtttttttaatacttacgggctgttcggacagtagtaatacaaaagcaacaaaaagcggtaaattgaacgtttatactaccgtttatcctttgcagtatttaacagaacaaattggtggcaaatatgtagacgttaaaagcatttacccgcctggttctgatgcccacagttttgaaccgacacagaaagatatgatgaaaattgccgatagcgacttatttttctatatcggacttggtatggaaggttttgtcgacaaggccgaaaaaacattaacgaatgaacatgttacttttgtccctaccgcagaaaaactcgacttgccaaaagatcctgatgcggccgaagaacatgaccacgaaagcgaagaggaacacaatcacggcgatataaatccgcacgtttggttaaaccctgtgtatatggaacaaatggctactatcgtaaaagataagttaattaaagaaatgcccgatcaaaaagaaacattcgagcaaaattatcaagctgtagaaaaaaatttaaaaaaactagatcaagatttccgctccgttacaagtgaagcaaaacaagaagattttgttacagctcatgccgcttacagttactgggaaacagaatataacttgcatcaaatccctatagccggcgtatcgactagcgacgaaccttctcagaagaaattaaaagctatcgtggaaaaaattgaagcagcaaaaatcccttacattatgcttgaacaaaacactaattcgaaaatagcagatgtcatcaagcaagaaacaaatacaaaaacactgacacttcataatcttctaaaaccctgccacaaaaggatatagaccagggtcgcgattatctttccatcatgaacgataatttaaaagctttaaaacaaggacttgattattaaaaaaagaaaggcactctaattaattagagtgtctttcttttaatttatttcgctgaattttgcctgaagctgttttcggtagatgttccacaatcgttatttgcttagggattttaaaactagccaagttcgtttgacaaatatcttttaataccccttcatcaaatccttcatttacaacgataaaggcaacaggaacactgccccatttagcatctgacttacctacaaccgcaacttcttccacagcctcataagcgccaatcacatgttctatttcagtcggataaatattttcgccaccagaaataattaaatcagaacgccgctctaaaacaaataaaaagccttcttcatccaaataaccaatatcacccgttttaaaccagccatctataaaagcttttgccgttgctttttcattgtgtaaatatccaggtgtaattgaaggtccttttagtaaaatttcgccatcgtcagcaatttttacttctgcaggaaataatgctttacctgaggagccaattttgtttaaggcatcttttggtggcaatgtcacaatttgtgaagccgtttcagtcattccaaacgactgtactaatggaatatcgcgttgtttacaaatttccaaaacagctttattagctggtcccccacctaacaaaacagttcgcacattcggatggtagcttccgccttgaatttttaacaatcgttctaacatcgaagtcactacagagatggtagaaattttaccactttcaagcaattgcgtaattttttcttcatcgaaatgctcttctaaatacacgggaattccataaataacggaacgcatcataattgataaaccgctgatatgaaaaataggtacagcgcaaagccaactatctttctccgttaaacctaaatttaaaactgaagaaacagcgctccaccaatgattttcatatgtttgcattacaccttttggttttccagttgttcctgaagtatacataaccgaagctgtgcgtgataaatcccatgttttgcataaatcgggttccacgtatgtcgtttgctgtaactcttcgtagctaattccagaagtcactttatccacaaacgcatctgctacaatcacttgttttacctcagcatttgccaattgaaaagtaatctcttttttcgttaaacgattgttaaggaataaagtgatagctccaagttgttgcaaagcatgaataagtaaaaaagtcattcggtcgttttttccaagtaaagcaaccatctcgtcttttctaataccgcgcgcgaataatttacccgcaagtttctctacggcttcatatatttcttcaaacgtttcttgttttccttcaaaaacaagcgcggtttctccaggagaaagccgcactcgtttttgaagccagtttgtcatgtccatttttacaccttcaaatcaagggaattttggaaattggtcaaagtcaggatcgcgtttttctttaaaggcatcgcgaccttctttggcttcatctgttgtatagtatagaagtgttgcgtcaccagctaattgctgaatacctgctaaaccgtcagtatctgcattgaaagctgctttgatgaaacgcaaggcagttggacttttttgtagcatttctttcgcccaagctaccgtttctttttctaaatctgctactggaacgactgtgttaatccagcccatttcaagtgcttcgtccgctgtatattgacggcacatgaaccaaacttctttcgctttcttatggccgataacacgtgctaaatagccagaaccatatccagcatcgaagctaccaacattcggcccagtttgtccgaatttcgcattgtctgctgcaattgttaagtcacatactaattgaagaacatttcccccaccaatggaccagcctgcaaccatcgcgataactggtttaggaataacgcgaattaaacgttgtaaatcaagtacgtttaagcgtggaatttggtcatcgccaacataaccgccgtgaccgcgcactttttggtctccgccagaacagaatgctttttcgccttccccagttaaaataataacgccaagatccgaattatcgcgtgccaagttaaatgcatcaatcatttctgttaccgtttttggtgtaaatgcattatgtacttctggacgattaatcgtaatttttgcgattccttcataactttcatatttgatttcctcgtatactttttctgtttgccaattaaaactcatttttcttcctcctttaaaataccttccagccagtatatgagctgacttgaaaaaatgtttggttgttctaaataaacagcatgccccgcttcttgtaccgtgacatgagtgctatttggtaaaagttgcttcatttctcgggcgattttttcgaatttctcatctaaattgcccgtaatcagtagcacaggaaaagtaaagtccgctaaattttcccaataagaaggttgcttcccggtgcccattccgcgtaaactctttgctaaaccatgtggattttgagctaatcgctctaatcttattcgcttttttaacgcaaacggtaaattcttctgtgatgcaaaaagggctaaattttcccagtaagctacaaaaggttcaataccatccgcatcaagcgtgtctgctaaccgattatctgcactaattcgacttgcgcgtgctttttcatctcgcagtcctggtgaactactaactagaacaagcccgcgcacaagctccttatattttgcagcaaaagcagtcgctactctcccgcccattgagtaccctaaaacaaaacagctatcgatttttaattgatgtaaaatactggccaaatcatcgcaaatattttcaatcgaataacgcgcaacttccttgggacaagaagtttttccatgcccaagtaaatcaggcgcgatgatactaaaatgctcttttaaaagcgatatgctatcttgaaaagtctcgctggaaccagtaaaaccatgtaacattaataaaactggtttttccccgcttatatcatttattaaatgataatgttgaccgtttactagcatattaatctaacgcctttaaagcagtcgcaattttttcccaaagcgcttggtggtttgctttattttcatgacgattggtttttacttcaataatatctaaacctttatggtagcttgctttatcaatagcttcttcaagtgagtccacagattttgcttcatgataatcagcatcataaaatgccgcagcaaagcggaaatcaagttcagttgaagtaccaaacagtgactcaaaatacttcggttcatttgcttgaggtaaaaatgagaagatcccaccgccgtcattgttgacgataataatagtaaggttcatcttatattttttcgccataagcaagccattcatatcatgataaaacgataaatcaccaatcagtaaaaacattggttggaatacaacactagcacctagcgccgaggaaacaaccccatcaataccattagcgccacggtttgcgagcatttttattttcttatcaatttgcgaaaaataggtatctacatcgcgaattggcatactattaccaataaataaaccagctttatctggtaacaaacggcgcaattccgaaacaattttgccctcttctaaagtagttgtattcgccatttcttccagaacgatttcgcgcgctttttgattgtaagaagtccatctatttaaccatgaagcgtctttcgtatcgtccggcatattttgttgcataatatcaagtaaaaatcgctcgtcgcagtgaatcatatccgttacagctttaattggatccttccaagcagcaccaggatctactacgtaaaatctgatgccaaaaagatgttccaaccagttttttagtggtttagaaactggcatacttccaaagcgaatcactacttctggtgttaatttatccaaaatatccgcttcttttaaaaatgcatcatattggtcaattaccacttcatccattgccccgtaagaacgtaagccagaaagaggatccgctaaaattggccaccctagttttttcgccaaatctaccatgggctgttccaattcttttttatcaatcggtccaacaacgaatacgccttttttgcccgtgcattcggtgaccattttttgaatggaactatcgtctaaaacttcatgcgtatagtaaatatgtacatgatgatgttttttcccagtagcagtaaatggagaaggttctaaaataggcacaagtggttcacgaagcggaaaattaagatgcactggtcccctaggtgttttcatagcaatatccaccgcgcgactactatgccatttagcatagcgaagcatttcatcactgttttcaggaagcgccatatcagtgaaatcttttacgtgcgaaccgtataaatgcagttgatccattgcttgtggtgctccaacatttctaagttcatgcggacggtcagcagttaggacaattaatggaatttgtgataaatttgcttccaccacagcaggaaaatagtttgccgctgcagttccggaagtacagagcagaacaactggacgtttggatgctttcgctagtccaagcgcaaaaaaaccagccgatcgttcatcaacatctacataaatcttcaatgttggatgttctgccatcatcagtgccagcggagttgaacgagaacccgggctaataattgcttcttttacaccggcttgcacaagctcctcaataaatgcagctaaataatctgtcagcacttgttcgtggtttgtcatttctttatgcctcctaatacgcgtaacatcggttggaatttaacctcagtttcttttaattcttcttttggaacagaatcaccaacaatcccgcaaccagcatagatcaaaccttgcgaatcaacaattaaaccagaacgaatcgcaacagcaaactcaccagagccttttaaatcaacccagccaattggtgcgccgtaaaatccgcggtccatttcttccttcattcgaataatcgccagccccattttttgcggtaatccgccaagtgccggtgtcggatgaagagctttcaccatttcaagcattgtcacatcaggctttttcttcgctgtaatattcatatataaatgttgaatatcgcgatttttcagtagaactggttggctagataacgaaagacctgttgtaaatggttttaatgtttcttccatcatttgtacaacataggaatgctctcgtaaattttttgcatcttgcagtaaagcatttcctagggcttcatctgcatcatccgtagcaccacgttcggttgaaccagctacacaagaggactggattgtatccccatttacagcaagcaatctttctggagttgcgccaaaaaagactcctgttcccttttctataagaaagaaataactattttcttgtgttgctagcatattttccaaaataattgcgctatctacttgtcgctggaaacgtaaccccatccgtctagctaaaactacttttttcacgtcttctgaatgattaatcatatcgataatctcacttgcagtctctaggaaatgctctttaccaatttccttaaaatctgttagcaatgccatttcagcttcattaacctcttgatgaatgattttttgccactgattaaaaacagcttctaatttgctctccgtatcatctgagtagatggacaaattgaccgttaagtagcttttcccatccttattagtcaacataaatagcggtaagtagaacaaaccatctttaaaactttgccattctttctctgtatcccgctcaggatcaaaagcaaaaccgccaaagtaaattggcccagttgcatctactgttgcatttgttacacaagtgcgcagtcttttttcaattttctcttgcagtccaagaaaagcatcttttttcttctccgccaaaaattgtttcgttacaccaaaaccggtcatcgtcagtgtcatttctggattttgccagaaaaaacgttcacctttaaaagccgtaccagcttttttaaacaatttgactggagacactaattcatctaactcagttacccagctaaatagagccggttgatcttggcttgcgctacgtttcgcttgattaaataaatcaagaggcaatttagtattcatatgcttatctctccttttacattcacatcttctattataccaaaaatagagctaaactgcttggtttgcgttttttctttcatttcgttattaattattgacgtcgttcaattaattccctaaaatgaagggtagacatctgaaacatatggaagtgaaaaaggagagaaaaacatggctaatgcctcaaaatctgcacttacaaaacaaactggatttcaaaaatggtggtcgttacttcgccctcatacgcttgtagcttcttttgttccggtatttttaggaacctccgtcgcaatgagctataccagttttcattttacacgttttatcgtcatgctaattgcttgtttcttcattcaaacatcagccaatctattcaatgaatattttgattataaaaaaggacaagacgatgaacattcggttggaaatggtggtgctatcgttcgtaatggtatgcgcccaggttttatattgttcctagcaatctttttatacattttatcgatcctcggtggcgtttatctatccattgaattaaattggtacgttggcttacttggcgcaatttgtatgcttgttggctttctttatacaggcggaccttacccaattgcttatacgccgtttggtgaaattatggcagggttctttatgggaggaattattacttttatttctttctacatccaagcggaatttattagttcttttatcgtctacgtttctattccaataatggtacttgttggaaacttgttactagccaatagtattcgtgatttagttcctgataagaaaaatggtcgtttaactttagctattttacttggtcgtaaatgggcaaccgttcttttcgcagctgcttttctgttcagttatgtatttgaaatcgcccttatctttacccaagatgctccgtggtggacactattaattctacttagtttgccagaagccattcgtgctgttcgtcgtttcattggaaaaacttcacctatcacaatggttccagcaatgaaatctacttccaaagctttaactatttttggaattacactagcattcgcttatcttttaagcctattatctagaaacttattcatgtaaaaaactggttgtcctaatgacaaccagtttttttatttggaagcaatttgtaattgttgtttattttgaacatatttcgcaagttcaatcgacaaatcatatcgtaaaaatggcgtaataatataaatcccctgaaaatgctcacaaatagcatcaactaattcacgcgcaatcgccatgccttcttcatttgcgtgaccgtgttcttccgcttctctcatccgttcccgaacctcatcagtcaaacgaatgcccggaacttcattatgaagaaattctgcatttcgacttgaaagtaatggcataaccccgataaaaagcggcacatcaatatttgccttttgcaaagcttctttaagcaaaacagctttatttacatcataaatgggctgcgtaataatataatccgcgccgtattctacttttcgttcaattaatcgaaccgccttttctaagttaagcacattggggttaaacgctgcgccaacatgaaaccgcgctttttccttcaacgattttcctgtatatgaaataccgtcattaaactttttaatcagttgaacgagctccaccgaccttaaatcaaacaccgaggatgctcctgggaaatcacctactttagtcggatcaccagtaatcgcaagcacatcatggagaccgagcttatgaaatcccatcacatgtgaatgcatcccaactaaattatggtcccgcgtcgtcaaatgaatcagcggtttaataccatactcatgtttcaaaatggaagccagcgccatattactaattctcggagtcgctagtgaattatccgaaatcgtaatcgcgtcaactccagcctcatccagcgccttagctccttcaaaaaatttcgatgtatcaaaagtccgaggtggatcaagttctactaaaatcgtcaaccgttccttcaccttatcaagtaaacgctcaccagactcctcgtcctcgacttcttcaggaacaagctccaaaatcggtcgaacttctttttccaaaacgggcttagtgctctctaatcctttacgtaaagcccgaatatgatctggagtcgttccgcaacagccaccaataattcgcgcaccttcttgtcgaaaaacttccccgtaatgctcaaaataatctgtatctgactgataaatgactttcccttcttgcacttctggcaggctcgcattgggataaacagctaagtatgccttatcataaagtggtactgtttcaagagcacgcgccatatgatatggtccaagtcggcaattgataccaaccacatctgcaccgagcgcaataagttcttccagcgcatctggtaattttttcccgttttgcaggatacctgattcatgcatcgatacatttgccacgacaggtaaatcagtcgtctcacggagaattttcaacaccgttttaagttcatctaaatcataatacgtctcgagcaaaattgcatccacaccatctaacaaaaaacagtatagctgctcccgaaaactacgcttaatttcttccagaggagccgccggaagtcttgcatccacagctccatttatcccgccaatcgtgccaaagatatacgtcccagtccctctcgccgcttcctttgctaaccgaatggctgcttggttaattcgcttcacttcatcctcaagaccatatcgagcgagtttaatataattggctccgtaagtattagtttgaataatatccgcaccagcaccaatataagccttatgaatcgctacaatatcttctggatgagataaattcagttcttcaaacgaacggtccaccccgtaggaataaagcaaagtgcccatcgcaccatctgcaattaatactttttcgcttaaatcttttcttaaattcatttcgcgacacttcctttcttaatgaacgaaagtgcttgttttaaatcagcaatcaaatcatctgcatcctcaagccccgctgaaaaacgtaataatcctggagtaattccttgttttaatcgctcctcttccggaacagcagcatgagacattttagcaggataagataaaatactctcaaccgcacctaaactcacggaaaataccggtaactccaaatgattcacgagctcgcgcactgcttcttcgctaccaagatcaaaagacaaaacagctccaccactcgtcgcttgttctacttgaatttcatagcctgcatgggatggtaacccaggataatgcaccgcgactacatctggttccgcatttaaaaacaaagcaattttttccgcagtttccgtcccagctttcatccgaacagatagcgttttaagtccacgaagcaacagccaagaatcttgcaccccaagaaccccaccagttgaattttgcaaaaagtaaatagcttcagccaaatccgggttattagtaacaataagccccgccaaaatatcactatgaccgccaagaaatttcgtcgcactgtggataaccaaatctgcccctagctctaacggtttttgaataagtggtgttaaaaaagtattgtcaacaaacgtatggcagccattcgctctcgcaagtttagaaacagtccgaatgtccgtcacatgtaatagcggattggatggtgtttccaagtaaaccaacttagtattcgcttgaaatgccttcgcaacttcatcaatatttgtcgtatcaacaaaagtatgcgtaatcccaaacctcggcaacacttgctcaaccaaacgaaaagttccaccatacacatcttttgaaataataaaatgatcccctttagatagtgtgaaaagtgccgcagaaacagcagccataccacttgcaaaagcaaaaccgttcgtgccactttctaactcggcaatcgcttgctccactttttctctcgtcggattgccacttcttgcataatcataagtatggtaattatcaaaatcatgttgatgaaatgtagacgataaatgaatgggcgtattaagtgcacctgtttctttatcgattcctaaactagctttaattacagctgtatcttgcccataatccttagccacgagcggtcacccctttcaaaaccgcatcaagcgctttagataaatcagcaattaaatcttcactagcttcaattccaaccgaaattcgtaataatttatctgtgagcccataagaatttctaagttccaatggaatatccgcatgagtttgtgttgttggataagtaatcaaactctctaccccacctaaactttccgcaaaagtaaacaactcaagctcttttaaaagtggcgatacgagcgctgcatccttaataaagaaactaatcattcccccgcggcccggatagcgcacttcctccactaactcatgctcttccaaaaacgcagcgattttctccgcatttgcctgatgctgtctcactcgtaaaacaagcgtcttcagaccacgaatcaaaagccaactatcaaatggtgataacacagtacccgttgcatttagctgatcaaaaaagaattttccaagccattcctctttaacaataaccgcgcctgccagcacatcgttatgtccaccaagatacttcgtcgcactatgaacaacaatatctgcgcctaaagttaatggttgctgcaaaacaggtgtataaaatgtattatctacaataacaagtaaatcattcgcatgtgcccaccgagacacactagcaatgtctgtttcttgcatcaatggattagtcggcgtttcgatgaaaattgcttttgtttccgggcgaaccaatttttccaaatcattcacattcgccccgtcccaataagaaaaaccaatctgatattgcgctccaaactgttcaaaatatctaaaagtcccaccgtacaaatcctgcgagcttataatatgttcacccgttttaaatagctgaaagactaattgaatcgcactcatcccagaactcgtcgcaaatgcatgcgtgccattctctagttccgcaagtgcttcttgtaaagcatctcgcgttggatttcccgttctagtataatcatatcccgttgataccccaagatcggcatgctggtaagctgtagagaagtagactggcatattgacagcacccgttctttcacactttctatttccaatttgcgctgctatcgtctcttgtttcagctttgccataattacctctcctccattcctttatttctctaatacttgatattctgcacgaacttctttagtcgctttaatcatatcttgaagtgctgcaattgtttcaggctctttccgcgttttcaaaccacaatccgggttaatccaaaattgttttgcatcaattgcacgtaacgcacggcggatattatcttgaatttctgaaacagttggaactcgtgggctatgaatatcataaacacccagtccaatttctttatcataagtcacttcttcaaatgtcgaaataatttccccatgacttcttgaggtttcaattgaaatcacatcggcatccaaagcactgattgtatcaataatgtcatcaaaatccgagtaacacatatgagtatgaatttgcgtatcattttgaaccgaagcagttgttaatttaaatgaatataccgcatcatctaaatatttttgccatctcgcttgtttcaatggtaaaccttcacgtaaggctggctcgtccacttggataaccttaatgccattacgttctagtgcttctacttctttacgaagcgcgaggccaacttgattcgcaacaacactttccggcacatcatcacggacaaaactccaattgatgattgttactggcgccgttagcatccccttcactgggcgcttcgttaacgactgggcatagacgctttctttcactgtaatttcctctgtaaaagcaacatccccatagataagtggtggacgaaccgctctcgaaccataagattgcacccacccaaatttagttgcttggaagccagctaatttttgtccaaaatattctaccatgtcagtacgttcaaattcaccgtgaactaacacatcaatatctaaatcctcttgaattttaatccagcgagcagtttctttttcaataaatgcattatattcggcatcggtaatatttccttttagccaatctgcacgtgtcttccgaacttctggtgactgtggaaaacttccgatagtcgttgttggaaacagtggtaatttgagccattcatgttgtaatttgattcgttctgcaaatggtaattctcggtcaacccgaacattttctaaattagcaatcgccgcttgaacttctaaattatttcgatggcttgattcattaagcgcttttacagcctcacgagcttcatttagctcagcagccacactttccgcaccttctgttaaagctttcgttaaaattgcaatttcatctaatttttgatcagcaaatgataagccgcctagaatcacttcatctaaatcaggttcgcttagttttgttactggtacatgtaataatgaattcgatggttggacaatcaatttatcctccgccacataatgagcgatgtcagtaaggagtgccaatttcgcatccaaatcactgcgccaaacatttcgaccatcaatcaccccagccgctaaatatttattttgcggaaatccgtgagctttcaacgctttaatcgaatcgccgtgatcatgaacaaaatcaattccaaccgccgcaactggcaaattaacaacctcttcataataatccaaactttcaaaataagtttgtaactctattttcaagtttggtacagcatcatgaaacgctttgtatactttttcaaataaagcaatttcttttttatcaaaactagttgcaagataaggttcgtcaatttgaacccacgtagcaccagcagtttcaagctctttcaaaatttcaatatacgctggaataaatttatctaataatatttcaaagctttctgcatcgctaccttttccaagttttaaataagtaactggaccaactagtactggcttcccttcaatcccaagctcgtttttcgcttcttcgtagtagtaaagcgcccggttatctaatactttaggatcagcttcagcaagttctggcacgatgtagtgatagttagtattgaaccatttagtcatttcagaagcaaccgcgtcactcttaccacgcgcaatatcaaaatatgtatttagcgaaaccttcccaccatcatgttgaaagcgttttggaataatcccaaatgtaacgctcgtatctagcacttgatcataaaaactaaagtcaccaactggaatcaaatcaattcctttatcttgttgtttctttagcgcatgtaatcttagagcttttgtttccgccaataattcctcttctgaaatcgcaccattccaaaacttttctagcgcacgtttccattcacgtttctccccaagtctcggataccccaagtttgaactaatcgcctttaccatacctatcaccttatcctctcaattttttgccaataaaaaacctccctagagaactagagaggtttggaagtttcgatacacaaatacagtgaaactttttaagtctctcttatctctcgaagcatcacacttcgcaggatttagcaccttttcaacgaattgaaaggttgctgggtttcaacgggccagtccctctaccactcataataagagtaatttatttagtttttttaatcacttaaattggattgaaatcatcataccacttgcaactaaaaactgtcaatcattaaatttttattttctttcaatgtgcttccttccgtcctcccaaagctaataataaacagcctagcaaaaggattccagcgaccacaaaataaaatatttgatttccaaaaatccctatcatcatccccgttgcactcggaccaataatactccctaaactaaagaacattcctaccaaaatatttccagccggaagtagttcaagcggcgtcaaatcagtcatataagataaccctagtgaataaagcgagcctagcaatatccccaaaataaagaaaaatatcacaaagaaaataggtatcttaacaaacgctgttaatacaaaaaccacagcccctgctccagtcaaaagcggtaacattttatcccgaccaaatttatcactaataatcccaatcggcacttgaaaaataatcgtcccaactgaaaaagaagaaataatcatcgcaatcatcattgtatcaagcccgtctcgcaaccctacaactggaaatgtcgcattaagtccggtttcaagaatcccatacaaaaacggtggaatcatcgcaacccaagccatcttaaatacgcccgaaaagcgttttatacttccccaaaaagaaattttccgaataacagccttttctcccacgaaatcatttcgaataaaccaaacaaggctccaagcaatcaatactaaaatacctgacaaaaagaaaggcaagtttgcatttacttttgccaaattcaccaactgtggcccaatcgcaaatcctacagagaaaaacaaaccataaatagccatattccgaccacgcttactaggatcactcattgctccaatccatgtctgcgaagaaaaatgcaacatatgatccccaataccaataagcaatcgcaatataaaccaaaaatataaattaaaccaaataggaaaagcaaatattgcaatcgcaacaagccctccgccaactaatattataggcttgtaaccatatttatgtaaaggtgcctcaataaatggagaaaccagtaaaacacctaagtaaattcctgttgcatgaaacccatttattccagcacttacccctttttcttctaaaattatcgcaataagtggcagtaaaacaccttgagataatccagatatagctacaaccatcgttaaaatccaaaacttcccttttgcccccataacacacctccgaaaaacttactaaaaaaaaacaatgtcgatgttcgacattgtttttttagatgacccgtacgggaatcgaacccgtgttaccgccgtgaaagggcggtgtcttaaccgcttgaccaacgggccatatctggcggagaaggagggatttgaaccctcgcgccgcgcgagcgacctacacccttagcaggggcgcctcttcagccacttgagtacttccccagatataaaaaatctattctctttttgaaagaataactccacaggcaggactcgaacctgcgaccgatcggttaacagccgattgctctaccaactgagctactgtggaataaaatgggcctaaatggactcgaaccatcgacctcacgcttatcaggcgtgcgctctaaccagctgagctataggcccctagtaaatctaattttatggtaaaaagcgggtgatgggaatcgaacccacgacaacagcttggaaggctgtagttttaccactaaactacacccgcataataaaatttaaaaacaaagggcggataatgggaatcgaacccacgaatgcctgaaccacaatcaggtgcgttaaccacttcgccatatccgccataaggcaaaaatgtttaaaaagaatggcttgggacagaatcgaactgccgacaccttgagcttcaatcaagtgctctaccaactgagctaccaagccataatggcggtcccgacgggatttgaacccgcgatctcctgcgtgacaggcaggcatgttaacccctacaccacggaaccactattgcgggggcaggatttgaacctacgaccttcgggttatgagcccgacgagctaccagactgctccaccccgcgacaataatatttaatttagtccacatatcacaagtgaaaaaacggaggaagagggattcgaacccccgcgcggtattacccgcctgtcggttttcaagaccgatcccttcagccagacttgggtattcctccatgataataataaagtgacaagtggaccttgcaggactcgaacctgcgaccggacggttatgagccgtctgctctaaccaactgagctaaaggtccaagattgaaaatagcggcggagggaatcgaacccacgacctctcgggtatgaaccgaacgctctagccagctgagctacgccgccataataataaggctaccattttctttctaattatgtgattaaatgtgaagtaagtggagcctagcgggatcgaaccgctgacctcctgcgtgcaaagcaggcgctctcccagctgagctaaggccccattataaaagatgaaacaatcgggaagacaggattcgaacctgcgaccccttggtcccaaaccaagtgctctaccaagctgagctacttcccgtttaataaagtgcgcccaagaggagtcgaacctctaaccgcttgattcgtagtcaagtactctatccagttgagctatgggcgcaaatataagtgccgaggaccggaatcgaaccggtacggatatcactatccgcaggattttaagtcctgtgcgtctgccagttccgccaccccggcgttgctataaaatatggagcggaagacggggttcgaacccgcgacccccaccttggcaaggtgatgttctaccactgaactacttccgcatattttataataagtgcgggtgaagggacttgaacccccacgcctcgcggcgccagatcctaaatctggtgcgtctgccaattccgccacacccgcaaaagtgagccgtgctgggttcgaaccagcgaccctctgattaaaagtcagatgctctaccaactgagctaacggctctctacaataaaaatatgtattattataaagataatattaatggtgccggctgcaagagtcgaactcgcgacctactgattacaaatcagttgctctaccaactgagctaagccggcataaaaaatggaggttaacgggatcgaaccgctgaccctctgcttgtaaggcagatgctctcccagctgagctaaacctccagaaataatattgcccggcagcgacctactctcgcagggggaagcccccaactaccattggcgcagagaagcttaactaccgtgttcgggatgggaacgggtgtgaccttctcgccataactaccagacaatatgcagttgttgaaagattgctctctcaaaactagagaagaaagggttcagttaggtaacttcgtttcattttttggttaagtcctcgatcgattagtatttgtccgctccatgtatcgctacactgccactccaaacctatctacctgatcatctttcagggatcttactttccgaagaaatgggaaatctcatcttgaggggggcttcacgcttagatgctttcagcgtttatccctgccacacatagctacccagcgatgctcctggcggaacaactggtacaccagcggtgtgtccatcccggtcctctcgtactaaggacagctcctctcaaatttcctgcgcccgcgacggatagggaccgaactgtctcacgacgttctgaacccagctcgcgtgccgctttaatgggcgaacagcccaacccttgggaccgactacagccccaggatgcgacgagccgacatcgaggtgccaaacctccccgtcgatgtggactcttgggggagataagcctgttatccccggggtagcttttatccgttgagcgatggcccttccatgcggaaccaccggatcactaagcccgactttcgtccctgctcgacttgtcagtctcgcagtcaagctcccttgtgcctttacactctgcgaatgatttccatccattctgagggaacctttgggcgcctccgttactctttaggaggcgaccgccccagtcaaactgcccacctgacactgtctccccacgcgcttagcgtggcgggttagaatggtcatacagccagggtagtatcccaccattgcctcctcgtatgctagcgcacacgtctcttcggctcctacctatcctgtacaagcggtacaaacattccatatcaggttgcagtaaagctccacggggtctttccgtcctgtcgcgggtaacctgcatcttcacaggtactataatttcaccgagtctctcgttgagacagtgcccagatcgttgcgcctttcgtgcgggtcggaacttacccgacaaggaatttcgctaccttaggaccgttatagttacggccgccgtttactggggcttcaattcgtaccttcgccgaagctaagcactcctcttaaccttccagcaccgggcaggcgtcagcccctatacgtcaccttacggttttgcagagacctgtgtttttgctaaacagtcgcctgggcctattcactgcggctctctcgggcttgcaccctaatagagcaccccttctcccgaagttac

SEQ ID NO: 4 - DNA, 33146 bp, Listeria innocua
tatcgcatttatgccattcccaccaatgaataacaatgtgggcggcgaaaaagtaaaaccagcgaaaatgaaattcaatgcaactagttgggcaatcataggtataggtttcacttgtactttcactttccaactatggttaaactgtaaccaagagctcggaaaattatatggcatggctgatccaagtaagattcaatcattctactcactaggtactatgtgtgctattttaattacagctgttctcgtgaaaaaattcattttaccagtgcgaattctcattatatatccagcaattgctactttaatgttactaattatttacatcgttcaaacaccgactatatgcttaattggtggatttgtaattggatacgctgctgctggtggggttcttcaactagctgtatcaactgccaacgaatttttccctacaaacaaagggaaaatcacttcgattgttatgatttcctcaagccttgcaaactatatcgttttaaacattgcgagctatattactaaagctggtggtatcgaaggtccgaaatatgtgttattattcaatgtagtgatcacagttatcggaatcttactagcaatcttcgtcaatatgcgttacaaaaatgaatctaaaattgcaactaaataagaaacacttcaactgagcattcacttgctcagttgaacttacatatcatttgtgaattaaagcacaaacttatgagttttatctatataaaagcttttaaaataagggtatttctcatgaaaaggtcttccaaagtaactacataaaggagagcagattatgaaaaataagtatttatctacttcactaggactttatatgaactatttcgttcatggtatggcgttaatcatcattgcacaaaatattgattttttatctcaaaaatggcatacagatttagctggtgctgccggcgttgtgtcttcatttgggattggtaaattacttgctgtttttatatcgggaaaactatcagataaattcggtcgtaaattatccgtcattctcggcgtatttttctatattgtttttttaggcggtattttgttaagtccaaatactatcatagcctatgcgttcggtatttcagcaggaattgcaaactctttccttgatacaggtacttacccagcattaatggaagcctaccctaaaaaagcggcatcagctaacattgttgtaaaagcttttgtgcaagctggtcagtttctcttaccatttatgattgcttttattttagcaaataacttatggtacggctggagttttatcgtgttaattgcgattttacttattaacttactgtatacgttgacccgtacgttccctccaatgaccgttggaaaaccgcttgatttcgagaaagaaatcgttgaagagaaaaaagcatttcattttagcattgatgaaatctgtttgattctctttggatttgtagcacagacgcttctatacattatgagtcaatggatagcaaaatacggttctgaagttattcatatgactgataacgcttctaggctacttgtgagctatgcaagtgttggtgctattttatgcgtatgtgtaacgtttattttaggaaatcgtggggttaaaacacttcacattttaataacgtatgtaacgatgacgatgttagtttctttcacgctttttgcattcccaactgaaattgtctgtctagttggcgctttcttgcttggttatttctcagctggcggtattatccaattaggtttaacacttctcgccgaagtctctgctcgtggtaaaggttttgttactagcctttatacgatcgctgaaggtattgctgtttttgttattccacttatcgctgccgctatttctaggattgatattgctgctattttcctactaaatgctggtattgcattattcgggttagctcttttattaatcgtatttgccagaaagaaaaaatttgctcgtgatcatatttaaaaaaagtatcgaggttggggaatccaacctcgatactttttttgttatagtttttttatagttttccatttgtacattaggaaccaaaatgctgtagcagtaacaatgaaaattaaaatcatttttacgagcaaagttacagcttgagtggttgttatcagactttcataattaaatttagagtaatgtccgcctaaacatatcgtgatataaatggaaccaataataagtatcggcatacggaatttattattcattaagaatctaccgttattttcaagggaagccgtttttaaggcataccagccaattattatcattaaaatggatagagcaataagtactataaattcgctgatgaccatacttccacttaaaagcggggttggtagtgctgaaaacaacataaccgcgccgccatcaacatcggccaatgatttaccttccaaaaaggctttaaatccaactatcaaattagttgttgcacctggaaacatgtagaaaaagcttgctactgctcctatagcaacgaggcctgcagcgattatgtctccaacaagataaccaacagctattgctaaagtgaaagagaataaaaataacagtgaaaaagatgcaatatacatactagaatcagacacattcggtaaatataactcaggaatttgctgatatatatacataaatctcaaggaaataattaaaggaactataataaagataattaatgaaggaatgagtaatttatgccaaaatatctggtttttagaataaggtaagccatacgtaaaataatccatttgcttatttttttcaaatacggttaactttaaccctaaaaacaaaaatacataaaagaacaaggctaaatttccttcaaaatcataaggagttaagcttaaatccattttaatttcatttggcgtcaattgttgatcatccacattcactttttgaaattcttccgactggtaatacttataattttgattaaacatatctactgtattagtagctgtcattgcttctgaaccaataaaggcaataacaataaataaaaatatccatgcgttttgacgccattctttaaagagaagccctgtactcattattcttctcccccttgttcctctagatgataaacaaacaggtcttctaatgtaaccgcaagttcatccatgaaaatcggtttttctcgttttatagcagcatataattctgtattcatatcccggaataaaatcgtatacacccgcccatatttgttaatcactttaccattttcaagtaaaatagttggtaattttttgttttcaaaagcaatttgaattttgactgcttgttcacgtaaagtttcaagatgataggattcttcaatgcgatttccttgtaaaatatggatataatcggcaattggttctaagtcgtttaaacgatgtgaagaaattacaatacctaatttccgtcgttctacttcttctaataaaatcccagtaattttcttttgagcgataacatctataccttccataggttcatcaagtaaaataaaatctgctccaatacaaagtgacaaaactaaaccgaaaagtgctttcattcctttagaatacgtttgaaacttaacatccgtggcaaggttgacttgattcattaataaatcaaatttagctccatcaaataatggataagtcttttgatagaatttttttattgttggaattttgtagccatcccagcagcctaagttatcttgtagcataaatattttttgctttagttcgggatttttacttatcggctcatctaagtagacatccccttcatctggaatgtaaaaacccatcattgttcgaaaaagtgttgtttttcctatgccgtttcgtccaactatgccaacaatctctcctggattcacttcaaatgttatcttatcaagcaaaagcttcccatcaatttttttacttaacgaatcaaccctcaaattttgtcacctccaatgatgtcctgactgtattcaacagataatttatgtatttcttccacattaattccaagataaactaaatctaaaattatttcttttaattttattttagtttctgctaacttttttggcgaactgttcttttctgtttggtccgcaataaaggttccttttcctttaaccgtgacgattacttcttgacgttctaattcttggtaagctttactcacagtgtttggattcactcctattctgctggcgaactctcgtatagaaagaattttttcgccttcttgaagtatgcctttgacaacttgttctttaattttttggacgatctgttcataaattggcagttgacttttcgtattaatagtaaacatctctccccccactttcatgacttttaattatagagaactaattgtactagttataatagtacagtagatataaaaataaatcaattcccttttaaaaagaaaattgatttacattctttttttctaatgttaatagcgcttgtttcattggtattccgccactataccctgttagtttcccgctttttccgatgactcggtggcacgggataattacaagtaaggggttttttccaatagctgttccgactgcacggactgcttttgggcgattaatttgttcagctatttctgtataggttctagtttcgccatatggaatcgtttttaaggcttcaaaaacttctaattgtaatgctgttccggataaatcaatagggaaagtgaaatgaatgctttctccatttaaataagcaagtagttctgctttatatttcctcattttctctgggtcatgtatcgctgattgcaagttttccttatttttcccaacataaaacaaacctttatcagtggcggcgaaataaattttttctcccgcaaaacggatggaatcatcatagaacttctccattttcttcacctctttcaactattaattatacgcttaacaaattagtttttctataatacctggttgtaatagcaagattagaaaagtttttctcgcaatttaacgctataacgtttatgattaagaagaagttgaggtgattacattgtcagattattacttaactaaaaaaagatggcaagcaatttcaacgaatgatcgcactgctgatggtacttttttctatggtgtgaagactacgaaaatattttgttttccttcttgtaaatcgcgtttacctaaaaaagaaaatattgttatcttccatagtaaggaagaagctacttcgcatggctttcgtccttgtaaacgatgcaaatctggagggaaaagtttacccgatacagaatgggtaggcaacattaaggcttacattgaagaaaattttgcaaagccattaactttacagattattgccgatgattgtcacgggagtccatatcatctccatcgaacgtttaaacggattacagacatcacaccaattacttatttagacaatattcgaatcgactatgcaaaaaatcagctccaaaacacaaccttatctattgaacttattggaaaaatgtctggttttcctaattcctcccatttttctactacttttaaaagacatacagctttatcgccaaaccaatttcgaaaagaacaaaaataaattagaacggatgaaacttatatgacgcatttaactttacctattttagaagactgggaaggtcttactctaactgctattttgcaagaaaaatttcaccttggaaaaaaagcacgacatgagatcagaatgtctcaagatgttttactgaataataaaccgctagacgactggaatactccgctttttgttggcgcaagtctttctttacctattattttgcacgataaaatcccggtttatgaatatgacttagaaattatttatgaagatgattttttactagtagttaataaacctgttgggatgaaaactcacgcaaatgacagctacgaaacggatacatgcgcaaatgcagtgcaatattatttagaaaaaacgggacaagaagcaaatgcactcgctgttcaccggctcgatcaaaccacttcaggattagttctttttgctaaaaacaagttagctatcgctggattatcgtggcaaatggaaaatagagcgattcaccggacttatcttgctgcggttgatggcacttggggacttgtgatgcagacgattaataaacctattggcgaagaccgtcatcacggctcaagacgccaaatcagtccttatggtcaacctgccgttactcacgttaaagttttagaaaatgacaatgaaaataatacgtctcttgtagaatgccaaatcgaaactggccggacgcaccaaatccgtgttcacttaagcggaatcggtcatccaatcattggcgatacactttacggcggatcaagtcgtgcaaaccgaatcatgttacacgcagagaaattacatcttaatcatcctttcaaaggcaaagaaatgaatttttccgcaccagctggagatgattgggtattttaaaaagccacaatattaaattgtgacttctgtacaaatctctactttcataccatccggatcttcaaaaaacacagcataatgatttttaccaccagcaaaaggaaacctgtcttcgtatagaagcttgattccttttgcttttaatttagctcgaaagtcatccacacgtttctttgtaccaccgtgaaaagctaaatgattaagtccaattcgcttacgatgataaccctctgagagaaatggctcctcggtttgaacaaagactaaatacgtctctccaaatttatagctaaatccttcattccacgtttgatataattcataagaaagctcttctaacagctccgaccaaaatagccggcttttttcgatattagctacatagatttccacatgatgtaacatttcacgcctccccgatatgtttaagcgcttctctacgactaagtggcgcaagcgtatggctgtttacaaaaacgcgaactgcctcactatctactttcgcatattgtctaagcgcccaaccgattgccttctgaatgaaaaactctttagaacctagccatttttcacaatttgcaaataagagttcagcatttgtttcttctttatattttaattgaaataaaatggccgtccgagctagccaaatattatctccgtttatccatgcttcattatagatagggattaaatcgggatatagtttgaaatgattacttacgaccgttccagctaagccatctaccgtatcccaccatgatttcgtcgtaactaattgctcatagatttcaattgcttcactggcttgttttttaccatagcgacttaataaatcaattgccgcgtattgaagttcacgctcttcttctgcaaataattccacaacaagtctcagtaaatcatccggcataccattttctcttaaaaaatctgctactaatttttttcgttcagtggctctaattcctaaaaatgggaattggtttttcatgtatgcttccattggcttcgaatctgctacagaacgattagcacggaataacgtttgaatagtcgtcattctttttccccacctgttaaataagctcgttctcgttcaatactgcttaaaaaatattctaaatcatctgggtctggcccaactcgtttacctgtttctagtcggtcgattttttccatgtcacttgcatccaactggaagtatgaaagtcgtgaattttcttcaatacggctagacgtaatcgacttaggaaaaataatcgtattccggttcaaatgccactgtaaaatcacttggtcaacagaagcttgatgttttttcgcaatttctgtaataactggattttgcattaatatccctttagcaagcggtgaccaggcagcatgcgcgatattctgttccgccaaatattttcgaaggtcattttgcggtaaaagcggatgcgtttctacttggtttaaaactggtttttcatttgcggcaaccaataaatcacttaaatgatgttgtttaaaattcgcaaccccaattgatttaataagtttttcatcatgtagccgctccattgcccgccatgaatcccggtatttccctgcaactggccagtgaattaaatataaatccaaataatccaacttcaaatttcgaagcgtccgttcaaaagcaaataaggtttcatcataaccaagatcgccattccacactttcgagcttataaataattcttctcgtggcactgcactatccaaaatcgcttgcccaacaattgcttcattattataaactgctgctgtatcaaataaacgataaccaacttcaatggctttctccacagcaccagcgataaattcttgctcagtcacttgaaatacaccaagtccaatataaggaattgtctcattccccggtagtatcattctgtcttgtaaagtttttgtcaaaacgaaaccctcctcacgaaaactaattgtgaactttttctcttaaatgaattatacactattttcgcaaatttatattttaaaaccagtataccgaaatgcgccttactctcctaataaaaagacgcaaaaaatctactttttttattcattttcttaaatacctaaaaacagccattggaaacgctgtcaggtcgtttatttgcgctttctgcaaaaaaaagtttcctatttattcccatcctatgttagtattaatttgtggtaaagatctatcaaattttttatttgtttttgttaacttatcgttaagaaaaaagctccctttttaaagtaaaagcgagctgattattaatgaccaaaaatgatcgggggaattaagaaaatggcttttaaaaataaaaaagaccgttttgcttcgttgttgcatgacattgcagtaaatttacatgaaggtgcaaatttctttgcaacttacaacattaattcggtggaggatttacatactttctcgaataaaatcaaagaatatgaaacagctggggactccatggttcacaaaatgattatggaattaaatgacgctttcatcacaccaatcgaacgcgaggatatgttagaacttactaaccgccttgatgacgtgatggatgcacttgatgagacagctttctcacttgaaatctgccaaatcactcattacgatgaatacatgactaaatttatccaagctatccaagcaagcactgttgaaattgaaaaagcagttgaccttgtttttgataaaaaattaaaagatgttcgtaaacttgcgattcaaattaaagattacgaatcccaatgtgatgatgtttaccgcgaatcactaatccaacttttccaaaacgaaaaagatccaattaaacttattcgtctaagagaagtttatgaaaaattagaagacattgctgatagttgtcaaagcgttgccaatacgcttgaatcaattgtcatgaaaaatgcgtaaggggtctagatagatggaaggaatgtttctaatcacccttgtcatcgtacttgctgcgcttgcatttgatctaatcaatggatttcatgatacagccaacgcaattgcgactagtgtctctacaaaagccttaaaaccacgacatgcgattattcttgcagcagtaatgaactttgtgggtgctatttcattcacaggggttgctaaaactattacaaaagacattgttaacccatttgacttagatcacggggaacttgttattttagcagcattactttcggcaatcgcatggaacttaattacttggtatttcgggattcctagtagttcctctcatgccttgattggttccattgcaggtgcagctattgcatcagccggatttgcagctatcgaatacagtggatttactaaaatcattgttggtttattagtatctcctgtacttgctttcgtagtcggttacacgatatattcactcttcaagattttcttgaagaacctaaacttagccacgaccaatcggcgcttccggatgattcaagtcggtacagccgcgctacaatcttacacacacggaacaaatgatgcacaaaaatcaatggggattatcacaatggctttaattgccagtggtttccaatcaacagatgatgtgcaattatgggttcaagtatcctgtgcggtagctatggcgattggtacaagtattggtggttggaaaatcatcaaaacagtcggcggtaaaatcatgaaaatcaaacccgttaacggtgtagcagctgacttaagttctgttattatcattttcggtgccactttcattcatttaccagttagtacaacacacgtaatcagctcttctattcttggtgttggaacagctcaccgtgttaaaggagtaaaatgggatactgcacaacgcatgattattacatgggttatcacacttcctatttctgcaacgattgcagctcttatcttctacgtactaagattcatcttataatttatttagagccttgttatagcaaggctctttttatacatttttttgaataaaactaataaatacaagaacaaatcaagtttattttaaaaacttattgcatatttactcattttgatgtattataataaacatcgataataacgatttatttatcataaattactcaaatactagagggagttgtacttatgcagaagcatgtattacaaaagttcgcagcaattttacttatttttatatttgtattttctggcttcacaacagtgttcgccgctgatacacaagatgaaactttaactaaaatccaagaaaaaggtgttttaacagttggactttccgctgattatccgccgtatgaatttcatcaaaccatcgacggtaaagataaggttgtcggttttgatgtaagtatcgctgaaaaaattgccaaagatttagacgttaaattagatattaaagaaatgaacttcgatagtttgctcggttcactaaaaaccggcaagattgatatgattatttctggtatgtcaccaactccagaacgtcaaaaagaagtcgatttttctgacccgtatatgtttgtacaacagcgcgttgtgattagaaaaacggataaagagaaatttacaagtgtaaatgattttaatggcattaaagttggtgcccaaaaacaaacaacccaagaagaattagccaaaaatgaactagttggttcagacgttgtttcacttcaaaaagtacctgatttaattttgaaccttaaaagcaacaagctcgatgcagtagttttagaaggacctgttgcagaagcttatattagccaagataaaacactcgcattagcagatattaaatttgttaatggtagcaaagaaacagccattgcaatgccaaaaggttccactgctttacaagaaaaagtcaacgcttctattaaagatatacaagatactggcttactgaagaaatatcaaaacgaagccaacaaattaatgttccaggatggtagtttttacgagaagtatggtaattactttatcactggtacattgattacgattgctcttgctgcaattggcgtattatgtggtgccattctcggctcattactagctctcatgaaacttgcaaaaacaagatggttacgctggccagcagcttgttatatagaatttgtccgtggtacgccacttctaattcaaattttcatcgtctttttcggaactcaaattatcggtatggacgtatccgcctttgtttctggttgtatcgccctatcgctaaacagtgccgcttatgttgctgaaattatccgcgcaggtatttctgctgtcaacaaagggcaaatggaagcagctcgttctcttggtatgacacaaggagcaagcatgcgttacatcatcttgccacaagccgtaaaaaatattcttcctgcgcttgggaatgaattcgttactgttattaaggaatcttccatcgtatccgtcattggtgtaacagaactaatgtttatgactggtgtagtccaaggcgcaagcttcaaaccatttatcccactaatcatcacatcattaatttactttgtactaacatttagcttgtcaagactactaggtgttgctgaaaggagaatgagaacaagtgattaatattaaaaacttacacaaacatttcggtaaattagaagtcttaaaaggcattgaccttgaaatcgcatccggagaagtggtcgtagttatcggcccttccggaagcgggaaaagtaccttcttacgttgcctgaacttattagaacaaccaacaaccggcacgattctttttgaaaacaaagacctaatggcaaaacaaacaaacgtcaacgaacttcgtcaaaaaatgggcatggttttccaaaacttcaacttatttccacataaaaatgttcttgaaaacctaatgctagccccaatgaaagtaaaaaacgaagatagcacagcagctaaagaacatgcgctttctctacttgaaaaagttggcttagctgataaagcaactagctacccttctcagctttctggtggacaacaacaacgggtagccattgccagagcccttgcaatgaatccagacgtaatgctattcgatgaaccaacttccgcactcgatccagaaatggtcggtgaagtattaagcgttatgaagtcgcttgctaaagaaggcatgacgatggttgtcgtcacacacgaaatgggattcgcaagagaagttgccgatcgcgttgtcttcatggatgccggcgtgattcaagaacaaggcacgcccgaagaagtattcggaaacccgcaaaacgatcgtactaaagactttttaggaaaagttttagcataaacatagattacgtctcacttatttctcggtgaggcgtttatctgcacttatagagaagaggagctaattaaacatgatgaataactcaaaaattgctaaaaaacatcaacaaatgcccgttaatatcctagctgatattggaacgcttgcaaaaacaatgccggatattctagatttatctattggcgaccctgatttaatcacagatgcatcaattattaacgcggcttttgaagacgtacgcgctggtcatacaaaatatacagaatctggtggggatgttgaattaattgacgccattcgtggttatttcagtcgcaattatgatctgtcttttgaacgaagccaaatccgtgccacagttggcgcacttcatggtatgtatttaaccttgcaaacgattttagatgacggtgatgaagtcattattcacgaaccatacttctccccttataaagatcaagtgttaaactcaggtggtacgccaatcattattccaacctacgaaaaagatggttttgccattaatgttgatattttagaagcagctattacgaataaaaccaaagctttaattttaaattcgcctaataatccaaccggtgccgtcttttctccagaaacttttgaaaaaatcgccaatctagcgaaaaaatatgacttctttattttatctgatgaagtgtatgatggttttagtttttatgaagacttcgtaccaatggccaaattcgcgcccgatcatacaatcacgttcggaagcatgtcaaaaaatttcgcaatgacaggttggcgccttgggtatatgattgctcctacctatttaaatgaagcagcaaaaattattaacgaaggaattacttattcagctccgtcaccgtcccaacgagctgctatttacgctttgaaccattctgagacactaattcctttagtaacagaaaccttccaaaaacgcctagaatatatcgcaaaacgagtagcagaaattccatatctttccttacacccgctaaaaggatccatttatgcatttattaatatttctaaaacaaaaatggattccgtttcctttacagaatacgttttaaaagaaacacaagtactcgttattccagggttagcttttggtgaatcaggtgataattacgttcgcctagccgcaacgcaagatattagcgtactagaagaagcattcaaccgtttagccaaattaaccttctaataaaaagagcaaactcgcttcatcagcaagtttgctcttttttttattttaatttgatttctgcaaaagaagaaacaactgtcgcttcttttggaaaagtaatatttttcgtcgcttcattaggtacgatgtaaacttttaagcccgcctgtagtgctgataacgcaccatttttcgagtcttctatcgcgattgcttcttccggctttacaccaagggcttccactgcttgtaaataaagtgctggatgtggtttaatttcctcgacatgatctgccgtttgtatcgtctcgaaatcagctaaaatgcccagacgatccagcgtaggttcaatccaatcaaatcccgaactcgttgcaagcccaattttataaccattcgcttttacttgttcaaaaaattctttaaagccattacgaaaaccaagtgattgttgcccgagatgacaagcttccgccacggtagttaaaaaagcttctttatcaaaagccccgttcgttgcttccatcatatagctaataattggttcttcacttgtaccgataatttgctgataaatttcatctggcaaatcaatattgtacgtatctttcaaatatttcattgtctccgtgtaccataaattctccgtatcaagcatagttccatcaaaatcaaaaacaactgctttcacatgcatccccctagtataagtgatactttcattgtaacatagataaactatttaagaaatcttccaaaaggggttgcttttttggtaaaaaacgaataatattgaagttgtggtttttaatgttcgttatttaccattaagcatgattttaaaaaaggagtgaaacacacgcatgtttcaattaaaagcaaacggtacagatgtaaaaactgaagttatctctggttttactacattcctaacgatggtatatatcgtagtagttaacccagcaattctttccgcagcaggtgttccattcaataccgtatttatggcaactatcatctctgcagtcattggtacattatggatggcgattttcgctaattatccaatcgcaattgcgccaggacttggtatgaatgcttatttcgtaacagtagttacaactcaaaaactagattattcggtcgcattcgctgcggtctttgtagcaggtattattttcttactattatctttaacgccgcttcgtgaaaaaatcattgaagccattccacataatttaaaagctgggattactgctggtattggtttatttatcgctttccttggcttccgtatgacaggtattattgtttctaacgattctaacttagtaggtttaggtgacttacattccaaagaagctattttagctattgttggtcttttaatcactttaatcttgcttgctttaaatgtaaaaggtgctttattcattgggatgattgcaactggtatcatcgcttttatcacaggtgaacttaaatttacagaaggtatcgtcaaacttccgccaatgccagaattcgtcttcactaaccctattcacgcttttggtgatgtgatgagttacgggctctatgctgtcgtcctgtccttcttacttataacgatttttgatacaaccggaacaatgattggtgttgcaaaaaaagctggcctaatgaaaggtgaatcattaccaaatgcgaaacaagcattaatggctgatgcggttgcaacaagtgttggttctatgtttggtacaactccaacaagtgcctacattgaatcttctgctggcgttgcaactggtggacgtactggtcttactacacttacagtagctatcttattcatggtgtcggcattcttcgctccacttgttggcgctgtatctggaatttctgctatcactgcaccagctctaatcattgttggtagcatgatgattggtgctgtaaaagaaatcgactgggatacactagatgaagctttccctgctttcttagttattctagcgatgccacttacttcaagtattgctatcggcttagcatttggtttcatttcttacccagtattaaaagtatttactggcaaatggcgcgaacttaactggttcttaatcgttatcgccgtattattcttcatcctcgttgcatttttaccacattaataaacgactagcgtctaccaaacttaggtaggcgcttttttattggacaaaaactcactcttttgctataaagaagagagaaactaattagaaatgagttgaacttgtcgtgtttttaaaatcactgctcgctggtgtcgcacttgctgttgtagttttcctagcaagttttctgatgcctgactacactgtatccaccttatattccatcgtaacaactatcattgtttttgcctccattatcttatctgcattcgtatcctttggtgggcgtagtggaaatccaagtcgaaaaagccaattacgctggagtatcctgtttttagttgcagcaattcctagctttatcggctttattattactttttacttttaaaataaaaagaagcattcccaaaacggaaatgcttctttttttaatcttctaaagcggaaatgaacgctggtaaatattctggtagatctggcgggcggcgactcgaaataatgtgcccgtctgttacaactggctcattatgccaaatagctcccgcattagtcatatcatctttaattcctggcgtacttgttacatttacaccttctaaaattccggcagaaacaagtacccaaccagcgtggcaaatttgtccgattggttttttcgctttatcaaacgcgcgaaccaaattaagtacgctgtcaaaacgacgcagcttatctggggaccaaccacctgggactaagattccatcataatcttctgcgcgaacagaatcaaaatcataatcagaagtaacaggaactccgtacttaccgtgataaacttttttagcttcctctgcaactaaatgtaccgaagcacctgcctcgcgtaatctaagcaccggataccatagctctaaatcctcaaagtcttcactaacaagtgcaataacttttttaccttttaaagtcatataaatctcctcctatcctcttctatagtataacaataactagattgttattaaattattccgcctataaaagaagacaaaaaaagacgctcgaaataaacatttccagcgttgccatcatgttcggtcgtctatgcataacgggatgaggcatagacataaactacacggccaatgagatgaatgaaaacaaataatgattttggtgtctaaacagatgtctgactagttgccattctattggaagatggatacaccaaaagtcattataaccatgatagggtcttatccccatgaaaatcacatttataaaatgaaactttcatcgaggtaaaactctatcctataacttattttactattcttctcaaaaaaagcaagtaaataaatatagattttttgtgacgaacttaaaaaaaacaagaaaagctttactattatcgcatacttttgtataaattaattttttataaataaaaaggagactattacaggctccttttaaccaaagatttcaacaatcatccatgaaaaaatagcgactaatggaattaaaacccatacattgtgtccaatcaggctaggacgagcagctggtctatcttcgagtagttgaattctttcacgtaaatcgtgtacttctagctctaaatcctgcactttatcttctagttcatacaaacgttcttccattttaatccctccacacctttttctacatctcattatacgcgcaacgaaatgaaatacatccttccataggctgatttattgctaatttattgtcataccgttcagccatttgctacaataaaagaaaacaatcaactgttggggtggaaaaatggaaattcaagtagaagaagctgttgtaaaactcattttacatgggggaaacacacgtaaagaagcatataaagcaattgattatgctgaaaaataccaatttgatcaggcagacaagcatttgcaaatggcccaagaacagtttcaagaaggtcacgtttggcaaacaaaactagtctcaattcgcgacactgaaaccgtagcacacccgtcatttttattaattcatggacaagaccatttaatgactgcccaagccgaactacaactagccaaaagaatcattgaacaatataaacatcaacaaaacttagaaaaacgcctaacaaaattagaaaatcagctagcttaagcatgagacgtagctggaaataagaaataagattcacttgtaaggattttcggacgcacaaacaatatatcttctgtctcaataatataagccgcgtcaatacgcgtatctttttcaggcgtaaataagagatgtatcgtcatgattccgtcactaagcaaataacttaaaacttccaccacatctagttttttgacactaagaatatctaatacatataagtccgtctcttctcgctcaaataaaacaattgcatctatttcttctatataataaatatcattttttaaagctatcaataaataaaacataagcaagtcttcactatttttcacatcaagcgtactagaaagtggtactcgttcggatacaatacgctgaattagctggaaatcggttttattatcgggattcagcttttttattttggaaaatttcttttttagactactagcatccacggtaaaactactctcttccactcgctcaaatccaaacttcggataaaaatcaagcacagaatcatttgcaaaaagataaagaaaatcatagtcatgttcatacttagtaattacgtgattcaataactgattcataagcccttggccgcgatactctggatgagtcattactgtgcctatttgaagcgccttgcaatccttcccctgataaatcaaatccattttattgatagaaacattcgcaatgatttcatttttatccaaataagaataacaaatatatttatcattccaaaaccctttttgaaaccattcttcaaaattaatatcaaacgtactttctgcaagtttattaaaactatcacggtacattttattgtctttataatcacttattagttcatagttcatttaaaattcctcgattcattcgtataaaaataacaggcacgacgcaacatacgccctacctgttaattttatttaatttaacgtataccaagtgctatttttgcatagcgtgacatacgatctttcgtccaaggtggattccaaacaagattcacattcgtatcttttacttctgggatatcacttaatgccatttgcacttgctctgttaaaatccctgcaagtggacagcccatcgtcgtaagcgtcattgatacggtacaaagcccatcttcatctaactcaacatcatatacaagtccaatgtttacaatatcaattccaagctccggatcaattacttgttccagcgcgcccattagattttcttttagttgctcatccatgaagcatatgcctcctttttgcaattttgtacatttattgtatcatatatgagaatgattttcattataagaatttctcaaaaaagctaactccttgtagcattccttcaactgaaactttgtgttttgcattatcatcaataataaattcgacattgtctgctaagctctcttcaaccaatgtctgatatagtttttcactgtacgcaaagggaactacatcatcttttttcccgtgccaaagtaacaatgggcggttattaattttcgtaatgttttgggttaaatcgtatttttgtaaagctaaaatccgttcatcaacatcataaggaaaagttaatccctgcgccaaagcatatttagataattctttagcaaagtcaacataataagcgcttcccattaaactaactgccactttaatataatcatattgtccgagtaaaccaagggatgtaattgctcccatcgacactcctccaacaccaatacggttggcatctgtttttcctgttttaattaattcctctgtaatgagcggaaattcagtaatattcgtttcaataacatcccaaaaataagtagcttgatcttccggattcgcgccttgaagacgttccccgtgtaacttagcatcaggtaaaactaccctaaaacctcgttgtgcaagcaaatacccgtaatgtaaataaagttctttttgtgaagtgaatccgtgataaaaaataatagtcggtaactctttttctgcattttcacgattactaatatgtaaaactggaattcccgcaattagttcattttctacttgaatcattgtgaagcctcatttctataggttttattgagttattgtaaagaacggaatcatttacaaataggtaataaacgtctatcattaacctgtgcccttattttagcatgaagggcagttatgaactaaccatatgaattaaaggagcaaactatgtctaaaaaattaatcgtactagaccttgatggcacaacacttagagatgatttaactatctcctcgcatactaaaaacacattagaaaaagcacgaatggccggtcacgaagtaatgatcgcaacaggacgcccttaccgcattagtggctcgtattatcatgagcttgaattaactacacctattgtaaattttaacggtgctgtttatcatcatccaagactcactacttttgctgaaggctatcatcacgcaattgatttacaagtagttcgagaattgcttgatttctccaatgatttcgcgctagataatattgcggctgaagtagaggataatgtctttttgaaagaacgcaataatagtgtaccagagacattccatttaggaacagaaaatattgtatttggaaatattcgcgacgccattacatcagatgctacatcgctattatttttcggtcaacttgatcaactagatttaattagtaaacatttagatgaatcactttctggcgttatttctcaccatacttggggagcgtctgcttggccagctgtagaaattatcaagtttggcattcataaagcaatcggtgtccaagccgctgcaaaaacacttggcttcgaccgtaaagatattatcgctttcggtgacgaaacgaatgatttacagatgcttgattatgctggcgttggcgttgcaatgggtaatgccgctgaatccgtgaaaaacgtcgcaaatgttgtaaccgcatctaaccaggatgacggaatcgctttatatctagaagaaaacttaaacctataataaaaagctgcaagtatggccttacaaaagttagaatctctaattttttgtttcaaccatgactttgcagctttttttacatcattttatttttatacatagctagtgctaatttttggtctgcttctgaacggaaatctccaaatacactcgaagtttccatgacattaataaatgctttagggtcaaattctccaacaatatgtgtaatgtcatatagctcataacgcgtaataaccatgattagcatagcaacatcctgttttgaatatccacccatcgcatctaccactgttattcctcgtaccatattttcatggatagctttaataactgtttcagaatgctgagtcataatcatcacagttagtttttgatgtctagtatggataatgtcaattactctactttgtacatataaagaaattaacgtataaagagcaaaagtccaatcataagcaaatcctgccacaataatgataataccgtttaatagtaagaaatacttcccaaatgaacgccctgttttaattgtaatatacatagctaaaatatctagcccgcctgtcgaaatcccaaatttcaatgctaacccaacacctacagaagcaattaatgctccaaaaatcgcattaagtaaaatgtcatttgaaacttgtacttccggaataacaattaagaaaaaagacataaaagcaacagttaaaaagctaaaaacagtaaaggatttccctacttttaaccaacctaaaatagcaacgggaatatttaacaacagaacaagtaaccctgtcgaaatcgaaatattcattgtatcacgtaacatgtctgatcctaattgcgcaaccccatttaatccagcagcataaacttgagctggtattaaaaagaagttcataccaattgcatttaaaagtgctgctatgattgcaatagcggtttttttagcatattctttatacactaattttgaactcattttcttctctccttttttggccctaacataacataccaactttctagagaaaagagaagtcttttttattatttttttgatttttaattaaataatggataaccgcctgataaataaaagcccagtgatacggttattactacaactataatgaaaatcattaagaacattcccgttggcttttgttgttttctataactaagcaacatttccaccacaccaattacaataatgcccattaagattttaaatatagctaaaatccagctttctttcacactgtactgcaccatcataatcccacttaatatgactaaaatataaaaaactcggttaatcatttgtaacatggtaaatcctttaacagattttgaatagattagtaacgctgtgacggttaaaacaacaattgctacccaagaaattaaatgtacatatccccacataatacttccttcttccctattaagattttctaactgtattcattaaagtaccaattttatcaattgtaatttccactgtatctccgtcttgtaaaaaggtcggaggattcatcccgctccctacaccactcggagtccccgttgcaattatatcccctggaagtaaagtatgaccttttgataaatcagagataattttcgctaaattgaaaatgaatttttctgtagaatcagattgtcttacttcaccgtttacttttgtttcaatatggaaaatcatttcttctttaggttgatattcaagtacatacggcccaattggacaactagcatcaaggctcttcccaatgtaaaattgtttatgttttttctgcaaatctctagctgtaatatcgttcaaaatagtaaacccaaaaacagatgataaagcttcactttcagatacatctctaatttgctctccaattataaccgctagttcgccttcgtaatctagtttttttgttatatcttgatgcaactcaatctcgccatgatgtggcaataagctattcgcacttttggtgaaaacgagaatatgttcaggcacatcctctttacttcccatttctaatacatgattataataattttttcccactgcgataatattgttaggaggcataaaaggtatttggatttctacatctgctaggtcaatactttcctttgtcatctttatgtcctgaacagcaggcttttctttaataacatctaataaagtagctggcggatcttgaaagatagcttgtgcaggaataattttattttcatttactaaagcaccgtaattatgttgccctttataagaatagcttaaccatttcatttaaataccttcctctatgtttatttggcaaatatgttgtccgtcgaaaaaatataaatatgcatgagaaacttttttcctactaattgcttgaatagcttccgcataaagtttaatttgaatttgataccgttccttcattactttctcagcggcttcccagttatcatatcgtccttcaattttatctgtcttgtaatcgattaaaataatggagtcttcttcctcaatcatgctatcaacaacaccttgaatgagcacgtgttcatcaagatttgtttgattgtataattttgctgcaggaagtaagtaactgaatggaacttcacgcttcactttatcttttttctgcaaaacggtttttcctagagctgattcaaagaacgcaataatttgattaacattgatagctttaatttgagcttctgtaagaatatctttttctctcattaattgtaataatgagactaaatctttttcggtcggtttatcatctaatggtacagcttgcattaacgtatgcattgccgtcccaatttccgtagctgacaacttattttgttgcaaaaatttaggtcggtctaaagatactttttggaattcttttaggatagatgtatcactccaactatcttgcaaagagaattgtcttttaagctctgtcacagactgcttagcacgaattccagtggcttcctcatctttatattggtaatgcataaaacgctcaatttcatccttatatggacttttaactggcacttgcttatgtgcttttacattctccatccagttatctgatttttccttttccaagtcatcagttaggaacatttctttcgttttaatttcaacttgaagcttcatatcagttggcagtgttttaatcttttcttcgcacaataattctttaaaatggctgtggcggattgtagcatttccaatccaatctaaataacacttcgcttttgctcgaattgctgcgggtaaaatagtttcttgttggttacttacttgtaaccaatttttacttgttttttcaaaatctggaacagttgcagttaaaattagtttttcttccgcacgagtaagtgcaacgtataaaacacgcatttcttccgcaatcatttctcggtattttttttgcttaatcgcttgttgcatgatagttggatagacaatcatcttttctatatctcgataattagaagcaaaaccatagtctttgtctaaaagtgttttactataaatgtcacgcatattaaattttctacttaatcctgaaactataactaccggaaactccaaacctttacttgcatgaatcgtcatcatacgcacaacatcttctttttcacctagcgtttttgctgtacctagatcatctccacgaacttctaatcgctcaacaaaacgcacaaaacggaataaccctcggaaagaagttttttcatattgattcgcacgatcatacaaagcgcgtaaattagcctgacgttgtttcccgcctggtaacccgcctacaaattcatagaagtttgtttcttgatagatttgccaaattaaggcagtcaaattttcccgaatagacagttcacgccaattgtttaattgtgttataaaacgactaattttatttgctgcatccgaaactgtaatatctttataagctagcatcgcatcaaaaaaatagccttttttcttcgccatccgaatttgtcctaattcttcttcatttaaaccgattattggagaacgtagaactgctgctagtgaaatatcttgatatggattatcgattactttcattagtgcaatcattgttgctacttcagtcgtttcgaaataaccagaattattattggcatagaaaggtatatcttttattttcattgcttcttccatatctggcgcactcgtcatagctcttgctagaataacaatatctctgtattgaatgggtctattttgttgtaactttttatcataaattggaaacttattatctatcatttctctaatttttgtcgcaatcgctcttgattcaacttgatttttttgcaactcttgtggcgataattcatcctcagattctttttcttctgatttcatatcaattaacaaaagttctgttgccatattgttagcttcaggaaaactagctcctaaagttaactcagctgcctcatcataatcgatttctgcaatatgcttatccatcaactgatgaaaaataaaattggtagcatcaagaacttctttcctacttctaaagttttgagataaatctattcgtattccgctgccttctccgtcttgctgatattcttgatactttgccatgaacaaagttggttccgctaatcgaaagcgataaattgattgctttacatccccaaccataaacaagtttccttttgtatcattcgaattagtgacaagcaaaagaatagtttcttgtaccatattagtatcttgatattcatcaattaatacttctttgaactgttttttataactatttgccacatcagagggcgcgccattttttaagaggatttttaaagctaaatgttctaagtcattaaagtctaataccccacgttgttgcttttcctcaaaaaagttttcagcaaattttttcactaattcgcttaacgttttaatatctggtttcattttttctaaatcacttaaataattttcttcttctcttgaaaaccaatctattaaaacatttttcacttctttttttgcagcatcacggaatttttttgcttcttctacatattcttcatcaaaatcagctttatttttaagggcaggtattcgtttgaaatcaatgctctcaaagccaaatttcacatcttgccaattatcccagctaatacttgataaagtgttaatttgtgctaaatcattttctaatgtgcttaaataaggagctggtccattattttcatttgcatagtctatggcggttaacaagtaacttttagcttgattaattctaagttgaatatcttctttaataattggaaaataaggtaattccgtgatagaagtaatcgcctgtgtatcgtaaaagcttaccatttgttctaaccataaatccgggtttggatttgctctagagaaatcataaagtttcgagattagcgtatgcaactccgcatcagatctatccccagtaaacgattcaactagatgaaaaaagccctcattattttctatactatattctttttctaacaggtcctctaaaacttcatcacgaatcatactgctttcgatgggttcaatcaaacggaaattaggatcaatatcagcttcaaaataatgttttcgaatgatttccaaacaaaatgaatgcaaagtcgagatagaggcatagtttagtaatgcaacttgtttttttaaatgtacagattccggattttgcactaatgcttcttctaaacttttacctattctatacttcatttctgcagctgaaacattggtaaaagttacaattaacaattcatcaacgtttagattttctgtttcatttattagtttttcaatgattcttgtaactaaaacagctgtcttaccagagcccgcagcagctgctacaagaatattgtttccatttgcttggatggctttccactggtcatcagtccataaagcatcttctggtttggttggtatatttaatctcatactactgcgtccctccttctatatccatttttgttaaaattgtttctgttttttcatttgttaaatgtctatattgattactcgctaaggatggatcaaatccacaaaacgagcgaaatccacaaaactgacaaggtgttttttcttttaatttataaggattaatggaaacagctccatctagtattttatttcctgcttcctgatatttttgtcttacaaatcggcgcattttatcaaactctgcttttgtcgcagttctggaacgcgcacttagctcaccgttttgcttaatttcagctggaataatattggaagactttcctttttccagatttgtatccataagcgaaacagccacaggatccgataaaattaagcctttcattttggaacttttttgcagttctcgagcaattgcttcatcactcaattctttctctgcttggacatattgattatgcatatgaaagtacagaaccccagcaggctcagcagttttgcctatcattttttgcgcatttgttacaacgatgtctaagtaagtcagcatttgaagagccaacccgtaataaacttcagtaagagccaaatcatgtgaactagatttataatcaatgattcgaaggaaagtacgatcatcttgttcagctgcatcaattctatcaatacgtccttgtaaaagaagttcgctatctgattgtaatggaatttttaaaggcggaatatctcctttcaaaccaaaatccacttctaaaccaattggacgaaacgcactgcttttcgcttgttcatttaaaaccgtagtagctcttgtaataatttggagtaatttatattgaatatattccatccgttttgaacttaataaaatttcatgttgaatcttcggagctaaaaatgtcatcgcaagtttagccatttgcctacattcttcttccgttaaattaccccaatctcggttagttcgttttaattcagcggaaatccattccatcgccccgtggaaaatttctcccatgtctacagcttgtagcttataatgagctctttcttctaatttcaagccatattgcgcaaagtgttgaaactcacaactaaaaaacttctccatccgcgaaacactcgcatgaatattttcaccaaataggtttttagcagttgtttcttggagtggtttggttttattttcataataaaggcttgaaagtacttgttttgctgcctcagattctttgctatcttcaaaataactattataagcatcccaccatacatttgataaaggatagccacgtttatacatttgtaattggcttgttaataagcccagtgtagcttgtttagaacgaatataactactttgttctttatcattcagtaaacttgggtcagttaaataaaccgattcatttaaatttttgaattggccttttatttttcttagataattcgactcactaagaactttcccttcttcatctgcagctggataactaagaaataatttgtcgcttggcaaactcattattttataggctaataaatcttcttcaccaatgttatttttagcagatggctttaaattgctattttctactcgcaaagagtcgcgatcttgatctgacaaaatccctttatctttttgacgtagtggcattacgccatcattcattccaatcgcaaaaataactttcatgttaagcaactttgcattttccatatcagctaaaactacttgatctaaagaaggtggtagtaaagaaaattctagcgcatccaagcccgtcgtaattatttcagaaaaactattaacatctaattcttcttcacctaaaacttctacaaattcatctagcagttctgatattgaactccaagcttgttcatgttctctagcaagttccaaataaccattttcttctgctacttgtctccatgattctaaatgttctacagctttaacttgctccaaataatgatatagagccatggcgaactctatgcctgtttttgcttttgttatattattttctaatgttgaaagaggctcaactataagattcctcatttcattaataacactttgggttgctaattcttcatctgtttgtggcaagacattggtagaaagccctcgaattttacggtaaatccaatcgccttctttttcccatttccacttattttgaataccattttcgagcacataattttcaagtatatctgcttttcttctcataatagtcgcattttcagccacatcaaagaaaaattctgttttaactgcttggaaaatcggctcatatttccaattaaataaaattgcatcaatgctagaacgaataaattcaataaatgggtgtttagccattgctcgttttttgtctataaaaataggaatatcaaaggactccattactgtttcacataaaatatcataatcaccgatgtttctagtcaaaatcgctatatctcggtatctatagccgtttaatgctaattgccgaatttcgcgggcaacaccttccatctcagcacgcctattattagcttgatggatggttaaatcatttgctcccccttcatatgacgagtatttattatctccccaagcgttggctaaaaaggctaatgagtcagagttagctcgtttattttctaaaagaattttctccggttccacttgaattttatttaatttagccatctctaataaagcaaagtatgcttcagtgctcgctttaaacatactgaaatcttccaaacctttatggatttcaggtacgtttaaagttaacgatactgttactttatcgcatttttgcattagcttttctattactgttaactcttgttttgaaaaagaagtaaatccgtcaataattatttccgtttgatttaaataatcactctcaataatcttatctgctaacagtctcaaataatcttcattttcaaggaattttcctgctaataattcttcatatttttgataaataagtgaaatgtcatgtactttgctagatacacttgtagataaatttgccgcactcttctctaattcgtctacagaaatttcttcttgtttcatttctttgaataacttagccagctctgaataaaagcctttttttgaagtagctctagagaaaattttcaacttatctttttgatctaaagcagcttttcgaataaccatctcaatacctgtttgactcaaaaaagttttagataagccaccagtttcttgaagtattttccaagcaagcctactaaaactgaaaatctgtgtccctagcatccctgccaagttttgtttatttaaaaagcttgtttccatttgaaacgtcatttgatcggggacgataaaaatatacgtcttagaagtttttttgattttttcgcctacttcatccatcaaatgagtggttttacctgttcctgctttaccagcaattatttgaagtgtcataccctcaccaccgaacatatgtttttatttagtttaccatatttgagcaatctgtccagaacttttttcgagtcttttttttcgtgaaaatttataaaacagctcaaaaaaactaagatagctcttactatcttagtttttcatatattctactcaaaagccagcatttcctgttggattttattcattttttctgttagctgcataaatttcgctttgttcctattatcgagagctttatcaatttcagctctaagttgttctaattttctctcttctaggagcatcgtcaggaagcattcgataaaaacatttgttaattctttttctcctttaaggacacccacttgattcatcaatgaattagaaaaatcacgcatttccacgactaccactcctccactcatatttattacaatttcgaaaaactgtaacatggcaagaaaaaacagaaaacggcttgaaaatacaactttacgaaaatctaatgacttgtaaattaccatgtgctataatgacaaaaaataactcataacttactttgatgcttcgtcgttatttgaaattttgtgcattacgcaataatttcagattacttcttagacataaatacaaacatagaggagttgaatgaaatgaaaaaagaacaaattagtactcagttttatgaagtaaatccccacacaatgattatttttccaaaaaaatctggaagtatagtctattcagaaatttatgaagttgattctcattatacttctaaatttaccccatttgagttaattaaaaccagctgtaactttttcggatcgagttatgatggagggagaagaaacgggataccaaaaataaagacatcctctcaaaaggatgtctttattttacttttatatagaagaaacagtatttctgtgactaattattaacaatagattgatgttgtaaatactcgtcatagatagtctttaaatccatttcattcttttttatacgtctttgcaaggcttttaactttcttgtttcatataattcggcaaacagcttttctatagccttatcttttccttctacgtagcagatgtatctaaaatcattaaagctatatagtctcatgtcataacctcgcaaaaaataatatcttctatattaatgtcaattattcgttcgtcaaagcgctgtaattgaactatatttctttcatgatctaaataaacaggaactacatacttgtatcgcacatgatgattgttctttaaaaacagtacttctattgaccaattgcgtttgagagcatccgctaacactattgaatgttctaaaatatcatcaattaaattatacatgttcttcacctcttgcatacattatacgaacaagcgttcttaaaatcaagcattaaaaagtgttgtgttgcataaaaatctatgtaataatattcacatgaacgattttcgttcattatttcattcaactattagctgtttgacatcccgttttttacatctgaatataacagcaacctcgaataaattttcggggtttttttgcataaaaaaagccctaacggtggggttaagggccatatatttctagttattcgaattaactaccactctgtcaattaacatttctttccacgtttcaggaaaaccaatcatttctagttcaataacctcttggtatttttgtattaattcttctattttatttacaaatatttcccactctgtttgatcaacgcacaaaaatttgaatataaatataacaataaatattctctttatatttagtttagccgtcccattaggtaattttggcgatactgttatcgttctattatagagcctcccattatgggcgcatatatttcgtattaacacaactgtgtgtaaccaactttgaatatattctgcatcatatccataaattttaaccattttctttttaattttaatatgtaaattactataaaacttagaaatatcattgaaattgcaaacttctactacaatccaaaaaggaaatttcccgttatattcttttttataccattcaatataaagttctctattagtatcagaataacttatgctactataaaatttattaagccattttgcgtagtattctggtttattaaaattattagcatatttgtaagctaacgggccgcaattatgcgaaaaatcataagcaagaacagatttaaattccgtttcaatcgtatctagcatagacaataaaatatttcttaattctttatc

SEQ ID NO: 5 - DNA, 43980 bp, Listeria innocua
  misc_feature (1)..(end): n can be any nucleotide: a, g, c or t/u
tacggcggaacctgtgctgtctgcagaaggaattaatgcactttctgtcaagttaagtacttgctctcctgaagcttttcctgagtttgagccttttttgtcgtcggatttggaatctgatccgcctccacatgctaccaagactaagcttagtaatagtgttaatccaagtgtaagaaataatttagattttttcactaagtagacctcccttttttatttttctgaaaaattgtttcgatacctattatactctaagaattctggctttgtaaattatttttacaagataaatgaaaacaaggatgaaagatacaagttattaaaatattaaggcaaaattgaaattgcgcgaaaaatctgaacagagattgttacgctatccattattttgcaataactagaattaattatgtatactttgctaaaccttttgattaagttttcagaaaacataaccatttaaattgataaatttacaatcgacttggccagttatgtataaatccaacgaagccatctttttctgtataagaaaaaatatcgaacccctttaaaatttaaaggattattatatttatatactttttttgagctgttgtctagataaaaatatcaaaaatttaattaaattttgtaataaattcgaaaaacgttggtatagtgggatttttttgttaataatatgtaaagacagtttagcgggttttttgcaaaaaaggtctaatttctaacattgcatgatagcttccttctatcatatagtgtttctgttagaattgtgataaagtgaattatgaattttaattagaggtgaagttatgtttttacgaattactatttatacacttattcaagaagctatagtatttgggattctgctttttggaaaaaatggtgtaagtttaagcggttatatagacgtcgcgttcctcgtctcactcattacattattaattggtttgctagtttatattatgaggagcggttttttagaccgagttcataacggcttccgaagtatttctcgtaaaatcaaacgtgaagaagaaaatgagttctcggatatgctcctttcagaacttgttgggctacagtatgctgggattttaattagcgcactgcttgttatgctctccagtattctctgtatgtttttatgattgacaagccgttttataaactgataaaatgaacttaatataactgatgcgttaataagaagaatagtacattttgttgctttgtaatagagagtctgtggttggtgaaaacagataaagcgcaaaatcgaatggacttctgaggactgtttgtgaaagaaaagtagcaagcagcggctaaagaccgttatcttctttaatagagtttttctattactaagagcctttatgaggtacttagggtggcaccgcggataaccgttcgtccctaaacatttatatgttgggatggacggttttttattttcgcaatcagtgaaaaaattggaggaatacaaaatgaaaaaagtaatattttccggcattcaacctagtggacaactaactttaggaaattatattggcgctttaaaacagtttggacagtttcaagatgaatatgaatgtttttattgtatcgtagacgaacacgctattacggtacctcaagatcgactaaaactacgcgaacaaacaagaagccttgccgctctttatttagccgttggacttgatcctgaaaaagcaacgttatttattcaatctgaggttgcagcccacgcacaagctgcttggattttacagtgtaacgtttatattggcgaattagaacgcatgacacagtttaaagataaatcagatggtaaagctggtgtgagtgctggactgttaacttaccctccattaatggctgcggatattctactttatcaaacaaacttagtacctgttggtgaagaccaaaaacaacatattgagttaactcgtgatttagcagaaagattcaataaaaagcatgctgatattttcacgatgccagaagtatttatccctaaacaaggcgctagagttatgtcgcttcaagacccaacgaaaaaaatgagtaaatctgatgcaaacttaaaaaatgcgattttcttattagatccacctgctacaatcagaaaaaaaatcaaaagcgctgttactgactctagtggtatcattgaatataacaaagaagaaaaacctggtgtctctaacttactaacgatctattccgttatcacaggtgaaacaatcgctaatatagaagaaaaatatgttggtaaaggctatggtgactttaaaacagatttagcagagttagttgttgctgaacttgagcaaatccaagaacgatattacgcttacttagaatctgaagaactggataatattttagatgcaggggcagaaaaagcggctcgtgttgctaataaaacattgaagaaaatggaaaatggtgtcggactaggacgcaaacgcagaaaataaataaaaggcgaatacttggataaccaagtattcgcctttttactattaattaacctactttaatttccacatcaatgttaccgcgagtagctttagagtaagggcaaacttcatgtgcttttttaagaagttcttctgttttttctttatcttgtccttcaatagttccttctaataatactccgattttgaaaccattgtcttctgggtcgctatacaagcttacagtcgctgttacagtactcttagcttcaattccagcttttccaagtactaattctaatgcactattgaaacaagctccatatcctgctgcaaataattgctcagggtttgttccaccgccgccgtctccaccaagttctgttggtgctgagatttcaaaataaaatacgttatctggagaatgtacttcaccgcttcttccaccagtgttaataaccgttgtttcataaagttttttcatttcctattcctcctaattgattagtaagtgcttgtaatttagtaagtaattgtgtgtaatcttgttcctcgaaacctagtaattgaaggcaagtgtccacgctttttaacacagcgggttgtatttctattgctttttctgttagttcaatatagacacggcgttcatcttccggatgacgactccgtgttacatatcccaaattctccattcgttttaacattggtgttaatgtcccgctgtctaaagctaatctttttccaagatcagtaaccgtttgtttttcaccttcccataaaacaagtaacgtaatatattgtggataggtaagttggaacggatctagtgcttcgcggtagagtttggtaaattgtttggatgcattgtaaacagaaaaacaaagctgttcctctaatatacgcgtgttcgtgtccaacatgttctcctccttttaagttgtgtacaatttaattttatacaactttattaattaaagctagttttttgctcaaaaaaagccttgattccattttaggaaacaaggctttagttattttagtcttctattcttttgaatactagtgtcgcattgtggccaccgaagccaaaagagttagacattacgacatttacttctgcttcacgagctttgtttggaacatagtccaagtcacaaacttcatcttgattttccaagtggattgttggcgcgataatattatcacgaatacttaataaagcaaaaatagcttcaataccacctgatgcacctaaagtatgtcctgtcattgatttggtagagctaatagccaatttcttcgcatgctcaccgaacacagttttaatcgcttgtgtttcgtattcatcattgtaaggagtacttgttccgtgcgcgttaatgtagtcaactttgtcaggagtaagtcccgcatcgtcaatcgccattttcattgcacgtgcagcgccttcaccatttggcgctggtgcagtaatatgatatgcatcacctgttgcaccgtaaccaacaacttctgcataaattttagcaccacgagcttttgcatgttcatattcttctaaaattacaaccccagcaccttcaccaataataaaaccatcacggtctttatcaaatggacgacatgctgtttctgggtctgggtttaatgataaagctttatttgctgtaaatcctgctagtgacatttttgtaattggcgcctctgctccaccagtaatcattgcatctgcatccccgcgttcgataactttaaatgcgtcaccgatagagttggttgcagtcgcacatgctgttactgtagtagagttaattccttttgctccaaaacgaatcgaaacttgtcctgaacccatatccggaatcatcattggtacaaagaacggactaacacgacgatgtccacgatttaggaaaacttcatattgtgtttcgaatgtttccattccaccgataccggatccaatccatacaccaacacgagtggcattggaatcatcaataattaaaccagaatcttgcacagccatttcagcacttgcaatggcataatgggtgaaacggtccattttacgagcttcttttttctctaaatatttttctacatcaaagtcttttaattctgctgcaattttaaccggaaagtcatccggattaagtcttgtcatttctgcaacaccattgacacctttttttgcgttttcccacgaagtttctgcatcattcccaattggtgtaactgctccaataccagtaacaactactcttcttctatccatttactcatctccttattttgcaattcataaaaaacaacttctgtctatgcgacagcagctagtataaaattaaggctttatttaaaataaaaatattgcacaaacaaaataaaccaaaagcctgctctattataacataaataaagaagagttgccctaactaaaataaacgttagggcaactttccttttgacgtatttttttatttaccccaacgaatgattagggcgccccatgttaagccgccaccaaagccgacaagtaacacgttatcattatctttaatacgaccttcttcaactgcatccactaaagcaagcgcaatagaagatgatgatgtatttccgtatttatgaactgttttcattagtttttcttctggaagatttaaacgttcacgagaagcttccataatacgaatattagcttggtgcggaattagtaaatctaagtcttctttttcaagtccagcactttctagtacgcgtaatgaagcctcacccatttgacgaactgcgaaacggaacacttcacgtccgttcatatagatttttttgttttcgtctaagttcaagtatttacctccagaaccgtccgaacccaagtcaaaggaaagtaaaccgtggtcatctgatacagggcccataacaactgcccctgctccatcaccaaataatactgctgttgcgcggtcgtcccagttagtaattttagataatttatctgcaccaactacaacaatatttttatacgcgccagttttaatgaattgagctgcagtaacaaccccaaatgtgaatccagcacacgctgcttcaacatccattcccgcagcattttttgctcctaagcgatcttggataatattggcaacggatggaaatgttgcttcttgtgtcacagttgcaacgataaacaaatcaatatcatctggagtaagaccagcattttcaattgctacttttgctgcttcatatgctaaatcatgtgtatactcatcgtcacgagcaattcttctctcttcaattccagtacgagtacgaatccactcatcagacgtttccatcattttttctaaatcaaagtttgttaatattttttcaggtacgtatttacctactcctaaaattcctgcgttcatgtgttctcctccatatcaaactacatcaggataaaagttcttctcctggatatttttatgacctggtgctaattttaacagagaaacttcaattacgcaattggattgctactttttattttacttcaagtgctttatttggattattttcagcaaatccaccagctttagaccagccaattattttaccatcatctgatttgatacggtaccaatactcatttttcacatctgctcggcggtcaatatctagttcttgacctaaataatcatttaaatctgctacgactttagaattatcttctacagggtatgcatagattttttgatctgagtcagttacatatttatctagtttcatatttgtttcatttttaggggtgtaaaaaatagtcactgtattactatttatccatccaattgatttgccttgatcttgaagttgataccaagtacctttttcggtaactgctttttgagttattcgtagcgttttactttggtaatctttggcacttcctacttgttctgcgccttttgtgttataaggttttgtccaaataatttcgttagcgggttttgttatttcagcataagccaattggctctctgatgaggttactgtatcgtaaatttgatcataatcatctaaattatatgtttctatagtagaaattagtttttctgcataagtcgggtcagttgcatatccagcatcttgaatcgcatgggctgcttttttatagtctgtttctccgataaccgcagaatataaatctggatttccagatactccattaataaaaagttgtgcatgatcgactaatgatgattttttatcagggtattttctgaaatcagcttgtgtatgataagctttaccattgctaaattcttgtgtacccattgaaactgaacttccttcatagctgcctttaattccaaacaagttgttagcagaagttgataagccactttcaccccaattggattctaagatggcttgagctaaagtaacactcgttaatattttttcttctttttgtaaatcttgtgcatcgctagcaattgattgtataaattgctgttgtgataaagtcattcctgcctgactcactgcggtttggcttgcttctgccgctcctacgttagcaaaaggtaacaaggtggaacttacgatagcacttgctagtaaaatctgcgtgaatttctttttcattatcagttggcacttcctatccaaattagttaattccccaatttaaatggctctgtctctgttaaccttcttcattctagcattttcattctgagaacttactaactttttgatgaaaggtttatcataaaagttagtaaatggctagttcaaaggatttgagagtacctatttacttttgacaatattatgtcattccatttaaccctctttacactactattctccgtttggtgaattattcctccctgtttttcgataatcgtattttcaaaagatatatgattggataatcaagttttatgtgctaaaatgtataatgaaatagatgaaatggggtgtaaggatgcgttacgtggtgactgtgttttgggtattcttactttctttaatggctgaattcgttctttcttccatgttatatgtatcatttgatatgacgcgggctattattttaacagtagggttatccttcttcattattttaatcactttcttgatgcctaaagatagcgaagtttatgactttaagtaaacatccaactttctgatagcgagaactcacttttcgagtgcagctcaaaaaaagaacctctttccacatgttggaaagaggttctttttttatttatccaagtaatatttattaactggttttaaatcatcgtttaattcatatacaagcggtacacctgttgggatttcaagttccataatttcgtcatcactaataccttctaagaattttaccaaggcgcgtaaactattaccgtgagctgcaataactacacgacgtcctgctttaatttctggtgcaattgtatccatccagtaaggaataactcgttctaaggttactttcaagttttcacccgatggaattgcatgggtatcaagaagttgataacggcgatcatttttcgcttgtctttcgtcgttttcttctaataatggtggaagagtatcgtagcttctgcgccatttttgtacttggtctgcgccgtatttttcagcagtttcttgtttattaagtccttgaagcgctccgtaatgtcgttcgtttaaacgccatgatttatggactggaacccacatttgatcagattcttctaaaacataattaagcgttttaatagctctagttaaaacggaagtaaaagctacatcaaattccaagccagcttctttaatccgttttcctgctgtcattgcttctacaacgccttcttctgataagtcaacatcatgccaaccagtaaataaattcaatttgttccattcactttgaccatgacgaattaatactaatttcatcttcctcatccttccattttcgcttattttctaaacgactaatccaacaaaagttttccctttcgagtcgtgaatcaaacattttccatgttattctgtgactttaaaagtaaattctttatcttgtaaatcaatttcaacggaagaatgcggcataattttaccagatacaatttctcttgcaagaggcgtttcgacatgacgcacaatatatcgtttcagtggacgcgcaccgtatactgggtcataagcttcttctgcaataaaggcttttgcgttatctgaaatagtaatcgtaatttcttgatcagcaaggcgaatttgaagttcttctactaatttttccacaatgcctttaatatcagcgagtgtaagtggtttaaatagaataatatcatctacccggtttaagaattctggtttaaattcactttgcaaaatttgcattacgtctgattctagttcaggcgagatttcaccttcttcggttctttcaagtaataaattagagccgatattagacgtcataatgattacggtgtttttaaagtcaattaagcgcccttgtgaatccgtaatccgaccatcgtcaagtacttgtaaaaggatattaaatacgtctggatgggctttttcgatttcatcaagtaagacaatcgaatatgggttgcgtcttacagcttcggtaagttgtccgccttcctcatatccaacataacctggaggagccccgacaagtcttgatacggaatgtttctccatgtattcagacatatcaattcgaatcatatgatcttcagaatcaaacatattataggctaatgctttggctagttccgttttaccaacaccggttgggcctaagaaaataaaggatccgattggtcgttttggatctttaatccccgcacgagcacgtaatactgcatcactaactaactgaaccgcgtcgtcttgaccaattactttttgatgaagaacatcggctaatttaagcagtttttcgcgttctccttctactaacttagtcactggtattccagtccatcgtccaacaatttcagcgatttcattttctgttacttcttcttgtaaaattcgatcttcttgggctgttttttcgcgattttccgtttctaatgctaataattctttttctactgctggaattttaccgtggcgaagttcagcagctttatttaaatcgtagttgttctctgcttcttctaattcatgacgcagatgatcgatttgttcacgaacttcacgaattttactgatttcgcttttttcggattcccatttagacttcattttatttgcttcttctttatagtcagctagttctcgctgtaacatctctaagcgccgttcacttgctgggtctttttcttcttttaatgccgcttcttcaatttctagctgcatgacttttcttgttacttcatcaagttcacttggcatagagtcaatttcgacacgaatagttgcacacgcttcatctactaaatcaattgctttatccggtaaaaaacgatccgtaatgtaacgattagaaaggctagctgcggcaactaaggcattatcatgaatatttaccccatgatggatttcaaaacgttcttttaaaccacgtaaaatggaaactgtatcttccacggttggttctggaacaagtactttttggaaacgtctttctagtgcagcatctttttcgatatattggcggtattcgtccaaagttgttgcgccgatacagtgaagttcacctcttgcaagcataggtttcaacatgtttccagcatccatagctccatctgttttacctgcgccgacaattgtatgaatttcatctataaagagcaaaatttgtccatcgctttgttttacttcttggagtactgcttttaaacgttcttcaaattcaccacgatacttagccccagcaataagggaaccaatatcaagggaaataattgttttatctttcaatccttctggaacgtcttttctgacaatacgttgtgctaaaccttccacaattgctgttttaccaacacctggttcaccaattagaactggattattttttgtttttcttgataaaattcggatgacattacgaatttctgcgtcgcgtccaatcactggatcaagtttcccgcttcttacttccgcgactaaatctcgtccatattttgttaaagcttcatagttttcctctgcattttgagaagtcacttttttccctcctctgatttttaaaattgcttcgttaatttgttttttagatttattttgcttttttaattcgactgtgatggggtttgacttttggtccattacagctaagataagatgttctgtcgatacaaaatcatcgtctaattgtttttgttctttttctgcatctctcattagttggaaaagtgcttgactcattgcttggccatagttcactccgcttcctgaaacaacaggaatttttcttaaagattcgtctactactttttgaagtgcctcaacattaacttctgctacatcatatgcgcgttttgcaaagtcactctcagttaataacactttaaaaacatgtataacgtcaatttcttgatgttctgatgcaatagctagattttgtgcgtccgcaattgtttgctggacttgttgggtaaatttttgtaaatccattttttgtcctccttataaaagataagtctgaccttttttgaccttaactttattatagttttttatcttgcttttgtctaacaaaaaccatctttttttatagaaaaagacctaccaatttttatgttggcagatcttcagaatttcttaatcacgacctgtaaatagacggagtaagaacatgaataagttaaggaaatcaaggtataaattcagcgcaagcattggtacatctgcaagttccacatcgcgcttcataatttggttaaaatcatacaaaatgtataatgagaaaataattgtcccacctgctgaaataatagttgtcagcatagaacctagtggtaaaaatactccagcaaaactaaagatgataagaataataatcgccgcgaataatgcgctacttaagaaagataagtctcttttcatttttgcgccaataaaagctaatgttgtgaatgtaatagttgctgtaacaaatgccatcagaacggcggcaccttgtcctgcaccaaaataatatgtcaaagttggtccaagcgttaagcctgtgacaaacgcaaatgctagtactactgggtaccctaccactttattaattgttttacttcgacgcactaccattgctgtgataagtaacgcgacttctaacacgacaagaggcaaataaagttctggacttaatttactcccaatcgcagcaccgatagatgcaagtagcaaagaaaatacaaaccaattaagtattttttgcataataatttgtttatttgttcttttctctgtgtttactcgctcggatgttggattgatttcgttcatgaacatttctcctcttcaattgattagttttattatatcaaaataattattacaattctatcggtcttgcgttggaaatttcataaaaaaagaagcgcacgaggcacttctctaaattaaatcaaattgtttcaagccaagcattattccatcgctgttgttgtctttcgttacaaagtcagctttttcttttaataaaggtacggcgttttccattgcaatcgcataatccactgcgccaaacatttctaaatcgttcattccatcaccaaacgcataagttggaacgtcttgatagcccattacttcaagtagcttcgaaataccaactgctttagatccgccttttcttaagacgtcattactaaatggtgtgttgcgaacaaattgtaattctggaaaacgttctggaaaataatcatcaccagtttcaagtaatagaagtgccatattgattgtttcttctttatacatattaggtcttacttttggcatcggctcgcctaaaaagtcataatgcgcttttacaactggtgtacttgcagttgcgccaattcttttatcattataatagcaaacctctacattttgtgatttagcttcttccgtcaaacgatcaagcaaatcagcatcaatcacatcttcgtacactttttctccttcaaaaatagccatttgtccgttcatcattactgcggattcaatgccggtaattttcatttgatgactgatttctataagggtccgaccagtagcaataacaggaataacattattttctcgaagtttatcaagtgcttgaagcgaggtatcaagtactttagattcactatttaatagtgttccatccatatcaaaaaaacaaattccacgtggtttcacattattcatcctttactaacataatatatccatcataccaatcttacggatgcaaagtaaaggttatttatacataacaaaatctcctgtgtgctcaaaaccaaggcggtgatatatttcaccagcaactgggttatcgtaaaataaacatggtttctttccttctgctaatacatcgcaacataatttttttagaagcgtacttgcaaaaccgcgttgtcgatatccatcacttgtcgctacacctgtaatcattgctgaaaaggaattttctgccgatgtttcagctacagcaactacttcttggtcttgttcaatataataaattcgtttcacgcctttttcaatttggcgaataattaattcttcattttcatcgcgcgaaccaaattctttaatgtgtttgcgcattttaataattggagctacgtcttctgctactgccgttcttacaataacgtcttgatttacagaaatacgatttacatgttcgcattcgcaaaaataagtgtcttgtcttttttcggcaagctctggtaaaaatggttctagttcctttgtgacacgagaaataccgctaacttcatatgtatcatgcttagcaataatttctgagaaagcttttgcatcaaaattagcgtcttttgaatagggtaagaaaaacgtatcgaatcgaagtaacaatgcatgtaatttacctgatgaatcgaattcgccccaaagatcttgcacatcactctcgtaaccaaaattttcgatatccccaataataaataaattgagggttgcttcgggttttaaaagtgccattacttcttcattatcagatacagttagttttctaatcatgtgtcacactcctattttgaaaattgtcttcattttacgtgagttagtgaggttcgtcaagccctgaatcttgctattttacggcatataaaaaagctcgggattattagtcccaagctttttatgattcgtaatgaatttcgccaatttttaacattaagctgatagcattgaatttttcgtctccaagatgcattttgtttgtatcttgaaaagtgataggtgctgctgtaatcgcttcttttggttgttcaaagaatttttcgtctaatgtcaaactttctgtaatttgtgttatgtatttttggaatttattttcgtttctcattttcccaatcattaatgctttcaaagtgttttgggaaatcccgactgcaagcgcgaatgttctatgagtatatccatttattttcatataaagtgacaaattagtggcaattctttgtttttctgccttgtttttcatttgggtgaacctcctgtctttctatagttatcattatgcccggcaaagatgagaatctgattaaaacttcatagtatttagctaaaaatattgaaaccgttttctttttttgcaaaaaaagtgccggaataacgagtatcccggcgcatttttttattttgtgtatgcatcccaaacgaccgttcttaaaacttctaaaaattcagggtcagcatttggcattggaggtcggtggtaagctgcaccaacttcatctgttactactttacattcataatcattatcataaagtacttctaaatgttctgcgacaaaaccaactggcgtataaataaaatgtttgtatttttctcggccatagagttcccttgttaaatcttgtacatcaggtccaagccaaggttctccggttttaccttcactttgccaacctagcgcataatgaggtactgctactttatcaaaaattaagtctgctgtttcttgaagttggtctgggtatggatcgttatgttgtttaattttctctggtaaactgtgtgcggaaacaattaacacagtgtctattaattcctctgctggaatttgtttagctgtttcattaattctatcagcccacatttgaatgaattttggttgtttataccaatcattaattgcttgaatatgaataccgcccaatttatcagcagcatcttttgctcttttgttatatgcttcgacactaaaactggaataatgaggcgctaaaacgatggaaatagcttcttctataccatctttatgcattgcttcaaccgcgtcttcaatgaatggttcgatatgttttaaaccgatatacgctttaaattctacttcatcttgtgcgtcgtttaatgctttttctagtccataggcttgtgcttcggtgattttcgcgagtggtgacaggcctccgatagcgtggtatcttccgcgtaaatctgcaatcatttcttcacttggcttatgtccgtgacgaatatctgtgtaataacgttcaatatcttcgtctttatacggagtcccgtatgccattacaagtaaacctacttttttagtcatttttcatcatcctttttttaatagaatttcgcttctttcatggatgtacttagttaatttttttagcatttctggtggtacttctggaaaaacaccgtgtcctaagttgaaaatgtatcctggttctagtataccttcttgcaaaattcgttccgtttctgcgatacatttttctggtgcaagaagtgtggatgggtcaagatttccttgaattgcttttgttggtactttttgtctagcagttgtaatcgtttcacgccaatctacaccgactacatctagtggcattgtttcccactctgctaaaagatgacttgccccaaccgcttgcataataatcggtgttgttggatgaacagctttcacttctttaacaatcatttcaataacaggtcggatgtactgcgcataatccgcacggctaagtgctcctacccaagaatcaaacaattgaacagcagaagccccggcgttaatttgcgctattaaataattcgcagtcatgcgtccaagtttttccattaaaattgcccaaacttctggttcacggtacataaaactttttgtttggtgataatttttcgatggaccaccttctatcatataacttgcaagtgtgaaaggtgctccagcaaatccaattaaaggtacatctaacatatcatcagctagtaattttatcgtatcaagcacataaggcacttcaatttccggtttaaaaatcgtcagtttctcgacatcttggaaagttctaattggattatgtatgactggaccaatgcctgacttaatctctacatctactcccatccccggaagtggtgtcataatatctttatataaaattgctgcatcgactccgtattgatctactggtaatttagtaacataagcacatatttctggctgatgagtaatttcaaatagcgaatatttttcttttaatttacgatattctggttgagatctccctgcttgtctcatgtaccaaaccggaattcggtccacttgttcttttcgcgctgcttttaaaaataaatcgttcgttatttttgtcattgagtcgcttcccttctttgttcatttacacacaataggcaacagaacaataaataacttctccagataaaaggatactagaaatcttgtataaaaccaaacaaattgcctatctgctgtttcaattatgaaaaacgtggaaaacaaaggtgtaatcatttatcttaattgaataaaactgaaagaaggacttatcatgaaaaaagtatttatcacaactggaacagaacattatcttcgtcaactaatggaaaactatattggcgagaatgtgacacttctgcaaaacttttcgcaatctcttttgtatcaagagtcaactggagaaaaacttttccaagaaggtaaagagtatcgagttttacaaagtagtggttctttaaaaggttttggaattgttgtgtttgaatatattcaacttcgcgatgaagagattccgattttcttacaaatgtatcaacatgctagcttacattttagtgaaacacctgggttacaaagcacaaaacttaccaaagcgatgaatacaaatcagtttttaattgtttctttttgggattccgaagttttctttcaagaatggaaaaaaactcctttacacaaagaaattacaagcatcatgaaaaaaaataatacgcaagttggtttctcacatgaagatatttatcattatccagaattctcacatgatgctaaataggaaaaagcgatttggaccaaaaatccaaatcgctttttttattcgtacatttttttaattctgattggagcataaaggaaagtaaaaatcgctacaaaagctaaatttattcctaatatcaccatcccgccgattgttccattttgggcaattccaataaggctaaagagtattgcttggccaagtagtaaaattcgtaaaaagtgaataaaactacggtggcgataagcatcatcaatcggataaagacgtaacataatttgtgcatcataatgttttagcatcgggataaattgaaagccagttaaatataagaataacaatgaaaaaataatattcaaataaaatccttgcacaaaaacgagcagaataacagcaattacagtgagtcgaacgtaaagtccgatgtattcattcgttcttacaaaagtgcggctaaataaataagcaaacgtttttcttttcgcataaggaattggctgatataagaaatcaagatagttccgtctacgaaccgtccctcgtaagtgtggtacatccgtaaataaattaaccaaacgatagaaacgattcattcgcgcttcttctttatctactaaatattcccatctaagcgtcactttagatgttttcttcttaatccagtaataactcgctaaaattacaactagaacaagtggaatcgaaataaaaggcgcagaaattaacgaaatataaattaaaatagcatttacaataacgcgaacaaacatccatgtcgtatcggcatcttccaatttcatactttcaaagccaaaataaatattccaagctttaagtaaagcaagcacgataaataatgtaaagaactggctataaggtattcctgtcacttctacatacataggcatacaaataccgagaacgattacgaatacatacaattgcataaagaaactggctatttttgcttgagaaaaataagcatccattgctttttcttgaacgattaagtaaactacgtccggtttttgtaggagcgttgcgactgggctaattgcaatagaagctgtaagtaaaataaccatcagcggaataactgggaaactcggctcaagtgttttcacccaacctgcgtaataaaaaataccggcaccaagcccaatgataagaacaaacagcagatgatcattaaacatataacggagatagcgcattacttctgtagtataagcgctaaaacgttccttccagagcgctttactgtcaaatatcatcttcatcagcttcctcttcctttgtcaactggatgtaaatttcatcaagtgaagctcctggcatttcaaagttcgtttgtaaatctttcaaagtaccttctgcacgaatttcaccttgatgaataatgataaaagtatcgcaatatttttcagctgtcgccaaaatatgcgttgacattaaaatacttgctccctcacttcgcatttcatccatccaattaagtagtgactggattccaagtggatcaagcccaacaaaaggttcgtcaataatatataatttaggctcaattaaaaaagccgacataatcattactttctgtttcatccctttagaaaaatgcgctggaaaccaattcaattttttctctaagcgaaattcttttaaaagtgggggcattctttcttgtaattcttcttgtgaaagaccataagccattccggttaattctagatgttcttttaatgttaattcttcatataataccggggtttctgggatataagaaaattgctttctatatgtttctgtatcttccactaattggtgaccgttgattttaattgtcccttgttttggatgcattaagccagttatgtgtttaatggttgtactttttcctgctccgtttaggccgattaatccaacaatttgtttttcttcaatcgcaaatgaaatatcttttaggactggtcgctttgtatacccgcccgtcaggtgttctacttctactaaagccatttccatacctccttacgtatctttagttaataatagcatattcataccttgaactgtcaaaataatccattgtccactatctcatacatgcttttgactcgtttttatgttaaattaaagtagtacataattaatatgttgtgaaaggtggtcatacttaatggacgattgcattttctgcaagatagttcgcggtgaaatcccttctgccaaagtgtatgaagatgatgaagtatacgcattccttgatttaggacaagtcacagaaggtcatacactcgtaattcctaaaaaacatgctaggaacacattcgatttacctgaagagacggctgctgaattattccgccgcgtgccaaaaatcgcgcgagctttaaaagaagctttaccgctacagggattaaatattttaaataataatgaagaagtagcttaccaatctgtttttcattgtcatatccatttaataccaaggtatagcaaatcagacgactttgggttaaaatggaaagataacgcagactggtatacacaagaacgttaccaagaaattgctgaacttattgcagcaaaagtagactaaaatgactttatggatggagtggagtataaatgaataaaaaatcacttatttttggtattttagctggtggggcaattggagccgcagcctcggtattatttgctccaaaatccggcaatgaacttcgaaaagatattgttgctaaatcaggtgaagcaagtgtcattttaaaagaattagcttacaatgcaaatgaacttattcaatctgttcaagttcttggctcagaaggctcaacactacttaaagatgtttcttctgacattatggaatctgtttctaagtggaacgaggaaatggaacctgaaaagaaacgcttaaaagacgaaattaaagatatgcaaaaaacaatttctgatttagaaaaaacactcaaaaaagataataaataagtataaaaactgggcgcttgctcagtttttttctgtgcttaaaatcaccttcataaaaacgtcaaaattaggcaattatttattaaaaaaagggttgaattttattccaattgagcatacaatactatggtgccttctgacggagcactattttagctttaactggaggaaagtttacaatgcgctgcttaaaatcaatcaacacagagcgacgagatgagtttaatcgacttttcctaaaaggtattcttgtttggctagctgccgtatgtatttgttttttaacacaacatttaatgtaccccggccaacttacaaatgattatcaattcatgagctttttgggtattgttttaatttatccgattcataagttgcttcatattattgggtgctttaaatatcgcgaaggtacagtcattcagtggcgtatccatttctttattcttccctgtataaaattaaatattaaacggataattccaaaatggcattacattttttcattaattttgccttttgtcgttatcactactattttaatcacattaatgcttataactccaattgggcactcgggaatgtttctaattttgttatctgtccactttggaatgagcttttcagattttactcacatcaaaaaactatggaaaatgccaaagaattgttttgtcgaaagtgcagaacgtggcttttcgattttaatttctgactaaaccataagaatatcattaaatttctttcatcttttctttttacctttaatttatgttatgatagttattgtgttaagcgggaattattccaacaactaaggagtgtgttttatttaatgaagaagaaattaattcttggacttgtcatgatgatggcattgttcagtctagcagcgtgtggtggcggcggtaatgtcgttaagactgattctggcgacgtaacgcaagatgagctttacgacgcaatgaaagataaatacggttctgagtttgtacaacaacttactttcgaaaaaatccttggtgataaatacaaagtaagcgatgaagatgttgataaaaaattcaaagagtacaaatcccaatacggcgatcaattctctgcagttttagctcaaagtggcttaactgagaaatcattcaaaagccaacttaagtacaacttattagttcaaaaagcaactgaagctaatgctgatactagcgataaagcacttaaagagtactacaaaacttggcaaccagatattactgtaagccatattctagtagctgatgaaaacaaagccaaagaagttgaacaaaaacttaaagacggcgcaaaatttgctgatttagcaaaagaatattctacagatactgctactaaagaaaacggtggccaattagcaccatttggttctggtaaaatggatcctgcatttgaaaaagcagcttatgcccttaaaaacaaaggcgacatcagcgctccagtaaaaactcaatatggataccacatcatccaaatggacaaaccagctacaaaaacaacttttgataaagataaaaaagctgttaaagaagcttaccttgcatcccaattaactacagaaaacatgcaaaaaacgcttaaaaaagaatacaaagatgctaacgtaaaagttgaagacaaagacttgaaagatgctttcaaagattttgacggttctgcttcaaaagattcatctaaataagtaactaaaaacacgattggaactagtttccaatcgtgtttttttatatagaaaagctgttcagttacgctccctgaacagcttttctgttattcaaaagttggattataaaaggaacgattatctaacccaaatactctttcactaaattcgcctggttttgtatgttttaatactttatccatcatatttagcgaagcatccattaaatcaatttgatgtaaaatttcagcttcacgaacgagtggtggcttcggacttccccactcgcctttaccatgatgagacaacagtacgtgttttaagacaactacttcttctccatcaatcgatagctcttcagcaattttacttacttcctcaacgacgatagaaatatgtccaattaagttaccttcaagtgtataagtggtcgaaactggtccagagagttcaattacttttcctaaatcatgtaaaataacgccagcataaagtaggtcgcgattaactgtcggatataaatcagccactgatttagctaaacgcaacatggaaaccacgtggaaacttaatcccgaaacaaattcatggtgatggcgcatggcagctggataatcataaaaatcatcttgatatttttttagtaaagctcgcgtaattcgttgcaagtttgcatttttcatttcgaaaatatactgggttatttcgtcagccatttcatctttattaataggcgctgtctccataaattcactagcgctaacgccatcaagtggtgatgcttgtctgatttggcgaattttcaattgctttcttccccgataattttgaatatctcccataaggtgaacaatttgctgcaccccgtaattaatttcatcgctttcttttacatcccaaagttttgcttctagttcacctgatttatcttgtaaaacaaggcttaaaaatggttttccattactcgccgttccttttacacttgatttaattagcaagaatagctcaaccgtttctccaacttcatagtctaataatcttttttccattgtatcgccttctttctttctgtagtaagaagtttctccaaccattatagcacgcgtatgtcttcactggaaaaatatttgcgagtttcttgatgacatgtgaaaaaaataacctgatttgtgctttttcttttttggagcaactgcatcatttgcaccattctcgccgagtcaaaatgaacaaaaccatcatcaataattataggtaatggaaaatctttatgaataacatcaattaacgcaaaacgaattgctaaatacagttgttcttttgttgcttgactcaattcctctgggaagaatgaaacgacttgtttactctcgacttgaatccggttttcttgtaagtacacttttgtgtaatttccattcgttaaatgattgaaatagtcgcttgctaaagctaatgtttttggtaactttccttcttgcaaactccgcatagtttcttgaagtatttgaagtgctagtttagtttctgtccattcccgagtcatttgttgcaatttgcttttttctgaatagaagtcttgcatgagtgcagcaaacgttccaccctcttctaaagttgctatctcatgattttttgcagccaatgaggcatgaatattttcttgttcaaattctattttgcgcagtttttcttctagttgcagttctttttctttaataacttcttgcgctgaaaactgacttaatgctagtcgcttgtctggttcgagttgtgcttctagtagaattaagcgttcgcgccattgctgttcttgttttactcgcattgctgctacgcggaattcgtcttcattatctactttggcttgttctaataagtcggatttttcctttttaacaagtagtagatcttgttttactagatttaattgcattgtaacttgttccattttttctgcgagtttggcgttttcggtcaaattatttcggtaatatagcaaaccttggcgtaagaaagatattttttcttcaatattagtaggttctataggtgcatctagtttttctaatctgagctggtatgagtgttgtttttctgctaatggttctaatttcaatgtcagttctgcagctaattgatttttttcgctatgttctttgtaggtttgaactatagcctcccagttttcatctggaagttcattaatcgctaacgtatcaaataaatggtttagttctgattgatagtcgtattgtgatttgtttattctgctttgtcgttcttctaattgtgctatttgtgaagcaataatgtccatttcgctcagtaattgttgccattcttgcctgattttttgctgttctaaaaacgctaaaatttgctgattgctagaaggcgcgggtgttttagtaagaactaataaataaacagatataagagccactagaaaaataccaacagcaacgctccaaatcgattgaaaaatcactaaaactactaaagccactagaaaaataccaacagctacaatcgatttagttacgggtgttttttcttttgaatttattttttctttttcttgttggaatcttttattgtcccacatatttgtttctattttatcgatcttttgttgcaatttttcttctgattcttgggtaagctttaattctaattgaatatcatgctgttgttgtttgtttatttgctcgagttcttttattcgaagtactttttgatctagctcttttgtccatttcattggtgtttgtttagcatctgtttgatagtacttgatctctttttctaaacttttttgttgtaattcgcgctcattataagcgccataagtttcgattaaataggttatttctgcttcgttttcagcaaaaaaagcagtatgttcaaaattatttttgttaatcaagtttttttggcgttcttctaattgaattaattgattttgccattctttttctcttagttgcaaatgttccaaacggataataccatctggtggaaaagtagcttcggttagaggtaccgctttttcgcttagtgccttccattcttggtaaatgggccataaatctagcaaggtatttagtgtatctagttcgacacgaatagcggttttttcttcttgtaattcagtttgtcttgctctttcttcttcttttccaaccaaaagcaactcatattttgcattttgttttttggcttcttgaaacgctaattggctatcttttacttttttgagttgttgattgattgcaggatttcttccgcttggtttaaaaagagcttccaattttttctgtaatatttcagccgtttttaaaagcgcatcagaccctgttgtacctgtggcaagcaaatatcgctcaaattcttttttcttccattgatgaatattttgtagtccatgaatatcaaaagaaaaaatagcttcaaacgtattacggtcgatttctccaataatttccgttaatttttcttctccagctacttggccatctccgtaataaatacgtacatctccagtagcttttccttttaaacgttcgacaatcactttacccataggtgtatcctcgagcgtcaatctcccaccataaggtccgccgtttttaggttccatacgtggaatagattgttgtctagttgggaaaccaaataaaatactatgtataaaagccataatagtcgattttccagcttcattttctccaaaaataacttgaaaatccgaaatatgattaaaatgagcatcggaccatttgccataaccaactatatcaatggacgttattctcatttctcatcaccttccacttctttaagcaccgttcctagttctgtcaaagctgcgtctaacattaactgccgatcttcttctgataaatcgtctaaatatctactcacaccactttcaaaatatagagcctccacagtttgataaaaagctgattcatcttgtaacttttcgaaagcttgagttatttctttactcgctaaatgctgctcatgccagttttttaaatcgctttggtttgtcagttctattgtgagtttatgaacccaaataaaggtgcttcccgttaagtctgtttcttcttgaagcatttgtagccagtcagttgtatttattttttgtttattggccatttgaacaataacatgcagaaaaaaggaattactctgaccttggtatgtagctaaaagttttgtgatttcccggtaaaaagtattgatttcgctattttcaggcaaggtaatgattacttcttcccaaataatagggctggttgctatgaaatcaatggtcgtatttgacgccgataatgtgacaatactcgctcctttttcgcctgactctttgcggtttcgtccttgaatatttcccgggtaataaacgcttggggattctgctaataattggcgtttatggatgtgtccgagcgcccagtaatcaaatccttttttagtgatttcctgaatacgaaatggtgcataaacatcatggtcttcactgcttgatagttcagaaccatgtaaaagcccgatatgaaaatctgcctctccttgtttattatattcgtttacacggctagcacgaatgtgacgttctccgtagctaaagccataaatatgaacaattgctccattctttgtttccatggcagccatttcaacttgttctgaaaaaacatggacatttccaggtaattgaagtttttccttatgtttctctataaaatcatgatttccgtgaataatgaatgcttttatcccagcttgctctagtcgcttcatttcttttgaaaaacgagcttgagcacggacactttgatcctcactatcataaatatctcctgcaattaatacaaattccaccgcttcttttattgctatcgttatgatgcgttccaacgattgaaatgtgctttcttgtacggcagaaaaaagtggttgtggcaatgtcgaaagcccaatgaaaggactatccagatgcaaatctgctatgtgtaaaaatttgatttctttcatgactttcgcctccttaaaaaaaccgaatatacgttcttattataccttactatctctttacgtacaagcatttcaaataaaaaaatggttctactatttgctaaataaataacaaataatagaaccacttcgattaatgaaaattagtcgtttgctacgttatataggtcttgtaatggcgtcataataatgcgatttagatcattaataattgtgctcattgcttgctctttttccattaatttaacgattagttcattttcttgaacttcttgtgctacttgttgtgcaacatttactgtttcgtcgtcaatttcttgaccagtcatttgtttttcttggattgttacttgaacatcacggaaacgttcgaattttgcttttgcgtccgcattttcgttcacttcacggtatgcatcttgtaagctgatgaattcaggtgtttcacgaattcctttgtctaaatcatgtgctacatcataaatattaactgccattgataaatcctccaaatatctgtatttgtcacttctgtttcactataacaaaaagtcgcatgttattccagtataaaagaactaaatccacatcgcgagtattccttgaatgattccgataaatcctcctaaaatcccgcctagataggttatcatttttaattctctaccggaaatctctacaacaagtttttcgatttcaggtaatgaaaaagtcgctatttgtgtttcgacaagttttgctaagtccattcgctccactatttctgcactatgagtcgctacaaaatcaagcattcgctctactgcaaaaggaatcattttttctgtaatggcggattcataattgcgtagtatgccttgaatgggttgattaaatagtttttcgtgtggaacagcttgaataatttctgaagtaagctgccctgccaaatgtgcttgtttttctgtcgggataagttcttgtagctcttttgcttcaaaattatgccattcagttgttagcaattggttgatgatatttttagtgtcttcttggttaataagttttaagccctcttgttgaattttttctgagaaactatcgatattgatgaacattctcgccatgctgcccattttcccatgttcttcaaagaatttttgaagcatttgtttaatctgaattttgcctgcttcactcgctataaaaacactcattttactcgttattctttctgttacatgagggagttttttagttagttcgttttctagcatagaaggaattaactcgctcatttgtgttgattgttttgttgttaaaaagcggctaatttcaatctctagcgttctttctaaccatgaaatagagcgaacttctgcattttcgtatcctaaatggtgcagtaattcgttcggcgttgtttctaatttcattttttcatgaaacatttttgtaatggtttctgttacttctctttgtaaattctcatccaatagtctggcgcgaatagcatcctctgttagcaaatgacttaccactacttttccaatgtgttctgcaagttcatcgcgtcttttcggaattagacctggtgtaaatggtaaacgtttattaaataggtaaacggctttgtacggacgaaagagcattcggatagcgatataattcgtcatcgctccaataaatccgccaatcactgccattaaaagtatcgtaaataatactgacatgttttgcatctcctaatatttgtctagtaaaagtggttttattatacgtgaaaaatccctagacaacaattgtttctagggaagttcattctaaagtatgagattacaaattagtcatttttagtgggtctatccataaatcgaattctttttctgttacaaaaccagttttaattgctgcttcttttaaagtcgtattttcatcgaaggctaacttggcaattttggcagctttttcgtaacctatatgtggattcaaggctgtaacaagcatcagcgaatcatttactttagcttcaatcacgctttcattggcagttagtccttctaaacaatgaattcggaaggagcgcatactatcagaaagtaatgtgatagattctaagaaattaaaaataattacaggcttataaacatttaattcaaaattaccttggcttgcagcaatattaatcgttgtatcatttcccattacttgagcggccaccatcgtaattgcctcacactgtgtagggttgacttttcctggcatgatggagctgcctggttcgttagccgggagcgttagttcaccaatgccactacgaggaccacttgctagtagacgaatatcgttagcaattttcattaaatcagaagcaaggctgcgaatggctccatggacgaaattaatcgggctatgactcgttaaagcgaaatatttattagaatcagaagtaaaaggatacccagtttgtttccttagttcttctgcaactttatcaccaaaatctttggaggcatttaatcccgttccaactgctgtcccgccaattgcaagtggtaaaattgctttcatgctagactcaaggtagtttttattatttgtcagacacgcttcccagccactaatttcttgcccaagcgtgagtggagttgcatcttgcaaatgcgttctaccaattttaacgagctgcatatattgatttttcttcgtcgttaaaacttcttccattttagttatctctgataaaagtttcgttactaaagcttgataagcagctatatgcatcgctgtcggaaatgtatcattcgagctttgcgacatgttaacatcatcatttggatgaactttttcctcacctaaagttaaattggcaacgtgggcaataacttcattaacgttcatattgctttgcgttccgcttcccgtttgccaaacgactaagggaaaatgttcatctagttcaccttgaatgatttgatcacaaacgtttccgattgctaccgatttcgcttcggataactttccttctaaggcattcactttagccgcagcttttttcaactgagcaaaagcgtagataatttctttcggcatataattatcaccaatagcaaagtttcttctacttcgctctgtttgtgctccccagtacttagttgcatcaactgaaatttctccaagtgtatcacgttcaattcgttccattttgccacccctttttattctattttattatattccggatgtttacgcaaaaccaacaaataatgttcgctattctgttttttgaagtggttttattttaatcattacaatggtgagaattattaataaagcgatccaagctattgaaatgaacagtgttggtataaagtagtccattgttttttctgacattattagcatggttgcatttttgcttaagtaagcaggattaaacatttgtatccaaccgccaaaaccgctaataacacctaagagaatggctgtaaatacgctaatcattgcaactacggcattgctatcaaatacagcactggcgaaaacgaccaaactaataacaaaaacaaaccaaagtgcgtagacaaaaaatccttcgatcaaagaattcatatctaaatcgccaaataaaaaatacgtataatatgctgctaaaacataaccaatgaataatgaacttaagccaacaatacattgcataacccacttggataggacatattctacggctgatactggtctagtcataataaaagcaagcatccctctagaacggtcattttgaatgcaagccatcgccgcgacaatcataatgataactccaatttgatcaaactgagagccaagtgtttgcgacattacttcttgcgctgattgatttcccatcaaggcgacaacttgctccgcttctgcgccagttccgaccgctttaagtatttctggtaaaaaataaagcattaatggttgtgtaagtccaagaagtgcaaagacaattggcatccaaatgattctcaaactccgccgctgttctaaccattcttttccgagcaaagcactaaaatgcgtcattatctcaccttctccataaaaatttcttctagactttggtgtctgttttctacacgaatcagctcacctttcgtttttaatagtgcttctagaatagcttctgagccagcttttttatctatagcatacacctgataaaccatgcctaccttttcgattttttcaatatccttattttgattaagaagcgctaaccaagcttcctcatctccaataaattcaacatcaaataccggggaactttcttcttgcataagctgttcaactgttttatccgcaactaattcaccgtttttgataattgcaatgcggtcacaaatctcttccgcatcttttaaaatatgagttgaaaacaaaattgtcatttcacttttcagtttttctaaaagcacgataatttcccggcgaccaattggatcaagtgcggataccggttcgtccaaaacaagcaattccggtcgatgtaaaattgcctgagcgatcccaagacgttgccgcattcctcctgaataggtgctaatttttttgttagtactatctgctaatccgactagtagtaagacttctttgattcgctcttctaaatcttgttttttcatgttagacagttttcccataaaacgaagacattctaatgcgctcatccaaccataaaattctggatattgtggtaaaaaaccaattttctcacgcactaactttgcttcttggccatctagtttaatttgaccctcgtcttgcgctaagatttggacaatcatgttaatcattgtcgacttacccgcgccatttggtccgattaaagccacacattctttattatttatagttagatcgattcctttaataacccattttccgttatattttttctttagtccttggatttctaattttttcattagctttcatcctcttttcgcccaaaaataaaatatgcaattggaccaaagatattaataaatataatgacaattaaccaaataatagggtttttacgtgtttgccaatttttagctaaatctataatcgctgttaaaagtaaggctaaataaagaattattacgggaattagtaatgctatttgcgttttatccaatgtattcacctcatttatttgttatactcattgtataacagttataatattaaagcaatataaaaaagcacattttactaagaataaagtaaaatgtgctttttattagttgccgatagaatcaattaagtttccagggccatctgaaacttttccgccaaattcttttactttctcggcgccttttttaatcgtttcgcctgcttcacctgctttgtcttttacgccactccagaagtcactgccactattgttgtcggattcttcttcttgttttttcgcagcagtttcttgtgcggcacttttagtatcaaagtcagcagatttttggtaacgtaagccactgttcattacataatgagctaggcttgataccccggcagagcttgttgtagtgaggtaatggtctttgtctgttttatcaaatcccatccaaacagcgccaactaaattaggcgtgtaacctacaaaccactgatcttttgtcccattagtatcattgaaaggaacttgagtcgaaccagttttacctgccatttcgtgaccggaaactgctgcactctgaccagtccctgtattgattacgtcaagtaacatcgatgtcatttctgttgaaacagtttttgagataatttgttttgtttttggaacattttcataaacggtatttcctgatggatcaacaattttagtaatgatatgcgattctggttttgcgccgttattggcaaatgtagcataagcagtagccatttcaactggcgaagcacctttactcataccaccgagtgctaatccaagtgtttggtctttttctggtacttcgatgccaaatttttctacagatttaacacctttgtcaataccgatttgatctaacaaccagaccgctggcgcattgattgagtttgccaccgctttgtacattgggacttctccattataaattccgcctacgttggttggagtatagtttcctttgtacgttactttttcatcttttaacatcgaatcgacattataacccgattgaagtgctggcgtatagacagcgagtggtttcatcgtagaacctggctgagccttcatttgcgtagctctgttaaatccacggaaaacgtgctctcctcgtccaccaacaagcgctctaattcctcctgttgctggatccattagaacagctcctgattggacaagcgtgccatcgttcgcatttctagggaataaagaatcgttattatacactttttctaaagaggtttgatagttttgatctaattccgtatagattttatagcctttttgcataatttcatcttgagtgatgtcagcttcatttactgcttcattgataactgcatcaacataccaaggatatttgtttgcaagtggatcttttgattggtcatttaaaacgattttggtcgctttatatttgtcaccttctgctttggttatatcgccggtttcaaccatagcattaagtaccatgttccgtcgattagttgccttttcaatatgttgatacgggtcataggcgctcggtgcttggagcagtcccgcaatagtcgcagcttccgggatgtttaaatcagctgctggctttccaaagtatttcaaagaagcgttctcaacaccccactccccgtttccaaagtaagagcggtttaagtacatttccataatttcatctttggagtaggttttttcaatctctcgagccataaaaatttccttcgcttttcgcgtaaaggtctgttcttgggttagcaaggcatttttggcaagctgttgtgtgatagtactaccaccacctgaaattcccccgtttgtaatcaggttaactccagcacgagcgattccttttaagtcaaagcccttgtgttcataaaaacgtcggtcttcaatggatacgactgcattttggaggtttttagagattttatcaattgatacaaaggttgcgtcagttgatgacaattctcccgctttatctccgtctttatcgtaaacaatcgtggctgattctaagccttttttcaaagcatctatatctgcggacttagctactacaacaagataaataataaaacttaataaaaatacgagtcctgcaagtaaaaaaatcttgccaatatgtttgtttttccagaagcgtctaaatttccgccataaggtgctaatccattttccaataaatccaaagaatgatttaatgtatttaatgagttgttgtttaaatttgtccatgtaactctcctatctttctacacggtattaaagaaaactgtaaacacagttatacacgtattttacgttaaaacacaattttatgccaccaactttagaccgatttttgtaatatttttgtaataatccatatttcctacacatttatttacttcttttttacaatttcttcattttaatgtttccagtagtttaaaaagggtagatattaatgttaccattactagtgttttggtaataataatcgcctatatactgtgtacaactagtaatggcagcaagttttacatgggttcattaataagccggaaaggatttggaatatgacgcaaaagctgatctactttttatcacaaacgcatattcgaagtgccattgctgaagcttgggcgaagaaactttcacttagcaatgtcaaattcattagcggttcttggcataaatccaaagcaactccatttattgcagaagcgttgaatgagtttgcgattgagccacctgaaagcttgtcttattcccctagctctgaactactggcagatgctgatctcattgtaacaatttatgattctgcacatgaaactgcaccacaatttcctgctaacatacaagaaaaaattatttattgggacattgatgatccagaacaagaaatagcgttacccaaaaaatgggcgagttatcaagaagtctgtgataacattgccttatctgtaaaaaatttagagcacgtattgatagaggcttagatttcgttgtcccgccactcgtaggcgggacttttatgttaaaagaaaggggtatacatactatggacggatataatgatttaaaaaaagcagaaaaagccgcctttttaagtatatttgcttacttatttctttccgttttaaaaattgcagctggtcatttcggaaattctgatgcattacttgcagatggattaaataacacaacagatatagtcgcatccgttgctcttcttattggccttagaatttcacgcattccacctgacgccgatcattcttatggtcaccggcgaacagaaacaattagctccttaattgcatccattattatgtttttagttggtgttcaagtcatttggagttctattgttcatattattgaaaaggaattcactgcaccttccatgttgactgctattgtagcacttttttcaggtgtattcatgtatgctatttatttatataatcatagactcgcgaaaaaacttgatagtcaggcggttcgagctgctgcttatgataatcgctctgatgcatttgttagttttggcgcattcattggaattatcggggcagtacttggggttccgtggctcgattcagtgacagcctttttagttggtgttttaattgtttatacggctgtcaaaatcttttatgatgcagctcatacattaacagatggctttgatgtatccaaattagaaacaattcacgatttaatcgcttctgtccccgatgtcaaaaaagttattgatataaaggcgcggatgaatggaaatcgtatttggattgatgcaactatcgcagttgatccagatttaaatgtagtaaaaagccatgaaattactgaaattgttgaacaaaaaatccgtaatgaatacgaaggcgcattcacgttagtccatattgaacctttttttgaataatattcattgtcaataatcgtaaagtcaactataatttagattaaagtatcatttgctgggagggaatattcgatggggcagagaaactaattcacttaaattatctaactagaatgaaaagtatgcagcaatacattggaggagttctcttccagagccgtttttttcttctatatagatagttttatcataagcttatttatattaaattaggaggtgtttgccttagcagaaacagtttctgccaaggcgatttattgatattaaccattaaatttttaattatagctttacttattgctatatcggcgtttttcgtggcaacggaatttgcgattgtaaaaatgcgaccgagccgtttggaccaattaattgcagagaaagataaacgtgcggttcttgctagacatatttacaatcatttgaacgcttacttatcggcctgccaactcgggataacgattagttctcttggacttggttggttaggggaatctacggttgaagctgcattgcatccattattcagcttgctagaactaccacaatctgctattacgattctttcgttcactatagcctttctttttatcacgttcttacacgtggttgtcggggaacttgtaccgaaaacacttgcgattgataaaactgaaacggttgctcttgcggtagcacgtccactgcatattttttataaagtgatgttcccgttcatttggattttaaatggttctgcggttttcatcgcgcgtttattcggcttagagccagcttctgaacatgaaatcgctcatacagaagatgagttaaaaataatcgttggcgaaagttataagagcggtgaaatcaatcaatcagaattccgttatgtgaataagatttttgattttgacgaacgtatggcgaaagaagtcatgattccgcgaacggagattgtaacggttgatacgggatctactatcggcgaattatccgacatcatgcaaaatgagcgttatacgcgctatccagttattgatggagataaggaccacgttattggtgtacttaatttaaaagaaattttgtcagcatatgtggaacacggatcgaatccaagttttagtattgatccttacgtaaaaccaattattcgtgtgattgaaacaattccaattaaagaattgcttttccgaatgcagcgcgaacgctcccatattgcgattttacttgacgaatatggcggtacttccgggctcgttacggtagaagatattgtcgaggaaatcgttggtgatattcgcgatgaatttgatgctgatgaaattccagaaatccgtaaaatcaaagacggtcactacattgttgacgcaaaacttctgattgatgaagtaaataatattttaggtactgaaatcgaggaagaagaagttgacacaatcggcggctggttcttaacacaaaattatgaagtagaagttggggacgaaatcgattacgatggctttattttccgcgtgaaacaaggcgaaccccatcatattgaatatattgagattatcaaaaaaacaaatgactaataataaaggtagctatccattcacttggatagctacctttttaaatgcgatgttctagcataaattgtttgaatcgctctgctgctggagttaacgtttggttttttacaaccgctaaataaaagaaacgttcccagtttggacttctaattggtaaaactttaacgtccacataatttaaaatcggcatatttggaacaacggcaatcccaaaattttgcgcaaccatccctgcaatcacttgatctacttcgatttcataggcaattttgtaatcctcgccaatttttctaaataaatcatcaataattggtcgtaagccgcttttctttgagaaagcaatatgcgggtatggcacggtttcaattaaatcaatccaatctttttcagctaatggatgactttttggtacaatcagcactaattcttgttttgcaatcggtgtaaaatgaatatttcgttcattctcgagcttagagcatatcccaatatcgtatttcttttcttttagtccttgaataatatcaatcgaaacacccgtatgaaaaacgaaatcaattttcttttctggttctgtttgtatgaattcttgaacaagcttaggcacaagtgaggttccaagcgtttgtaaaaatgctaaatcaatctgcccttctccgtttgcggcttttttggtagttgctactccggcatcaatcatgtctaacgattcttctacataatccagaaatacttttccagccttgcttaatccaatgtttcgtccctctttttcaaataaaggtatacctaattcttgttctaacgaagaaattgcgtgacttaaactcggttgagtgatgagtaatttttcagctgcttttgtgtaatgttccatgtgcgccaatgtgacgaaataacgtaaatggtgtaaattcatggcttctctccttactaaaaattatctatgtaatttatctatcaattaatagaataataccaatttgtttttatggaatagtcataatacaattagactgtagttacaccagcagaacaaactattccttaaaaaccaatatacggtagaatacgttaactgtccagttgaaatttcaaacattgaaggcgttatcacatcagcgatatttaatgaacgggaatttatttttttactggtgtttgtgaaaatattatcaaagtttcttgtgatttttattctagagaggagataatttttatgacaaatgcaaatggcgacctaaaaaaatgcccaatcacgattagctcatacacgcttggaacggaggtatcttttcctgaacgagtgagaatcgcagcagaaaatggttttgatggaattggcttgcgtgcagaaaactatgtagatgcattagccgctggattaactgatgaagatatgttgcggattttagatgagcataacatcaaagtaacagaagtagaatacataactcagtggggaaccgccgaggaccgcacagtcgaacagcaaaagaaagaacaaactactttccacatggcgcgtttattcggcgtcaaacatattaactgcggtttgcttgaaaaaatccccgaagaacaaatcattacggcactcggtgaattgtgtgaccgtgcggaagaattaattatcggtttagagtttatgccatacagtggtgtagcagacttagcagcagcttggcgtgtagctgaagcatgtggcagggataatgcacaactaatttgcgacacttggcactgggctagagcaaaccaaacagcagaatcaattaaaaatgttcccgctgaccggattgtttccatccaattatgcgacgtacacgaaacaccttacaaagaacttcgggaagaatctctccatgaccgacttgctcctggcgaaggatacggcgatacagtcggctttgctcgaatcttgaaagagcatggcgttaacccccgtgttatgggcgttgaagttatatccgactccatggtagaaactggtttagaatatgctgccatcaaagtatataatgccacgaaaaaagtattagacgaagcatggccagaaatttctcccaaataataaaataattaaacatgtgaaaaaagtaacgtaacaagaagattctaccttgaaagggaagtgttttttttgaaatttaattcgatgttctcaccgattgatatcgggcctatgagagtaccaaatcgttttgttgtatctccaatgtgtaataactatgcgaatacagatggcactttaacagatacttcattagcctattataaagaacgtgcgcttggtggctttggtctaattacttttgaagcgaccgttgtagatgttcgggcaaaaggcggcgcaaataaagcatgtctttatagcgatcatcaaattgccagttttaaacgagtgatagatgcttgtcatgacgcgggtgccaaaatctctgtgcaattgcaacacgctggacctgaaggaaattctaaagtttctggttatcctttaaaagcagcttccgccatcgcttcagcagaaggacgcaatacaccggaagccatttcacgggaagaactttatgaattaattgaactttacggggaagcggctttacgagcaaaaaaagctggggctgatgcagtagaagttcactgcgctcatggttatttagtaagtagtttcctatctggacgcacgaataaacgtgtggatgaattcggcggctgttttgaaaatagaatgcgactaccaagactcattatcgaaagcattcgaaaacgtgttggtcattccatcgcaatcctatgccgaattaacagtacggatggcgtggatggcggactaagtgtccaagatagtgcgacggtagctgcttatttggaagattgtggtttagatggtttgcatgtttctcgtagcgttcatattcgcgatgaatacatgtgggctcctaccgtgttacacgctggttttagttctgaccttgtaacacaaattaaacgcgcggtttctatcccagtaattacagttgggcgtttcaccgagccgcattatgctgaactaatggttcgcgaaggtcgggctgacttagttgctttcggacgacaatcgttagctgatccagaaacaccgaataaggcggcggctggaaaactagacgaattacttccttgtatcgcttgtcttcaaggttgtgtagctaacatgtatgctggaaaacctattacttgtttagtgaatcctctactcggccgcgaatccgaagcctatttgccaaaaacacctagtaaaaaagttgttgttatcggcggtggtgttggagggctttatgctggttggatggctggctcaagaggtcatgatgtaacagtgtacgaagcatcagacattatcggcggccaaatgcgtttagctgcctatcccccaggaaaaggcgacctaactaatatggttcgcagttacattaaaaaatgtgagcaattcgatgtggaaattaaaaccaatacacctgtcacgcccgaacttattcaagatattgccccagatgcagttattattgcgacgggcgctaccccactcgtcttaccaattccaggtattgaagattccggcttaatccacgcagtcgacttacttgatggcaaagaatcttgtggcaaaaaagtactagttgttggcggaggtatggttggtagtgagactgctgcatttttaggtgaagctggtcatgatgtaacagtcgtcgaacttcgtgatgaagtcggagcagatgttatttctgaacaccgaaaattccttatgcgcgattttgacgagtataaaattaaaagtattactaatgcaaaagtgacgagtttcttaccagacggggtcacgtactccttagctgatgaaaaagagtaccgcattgatgggtttgattctgtcgtacttgcaatgggatcaagagcttacaatccactggaggaagccatcaagaaaatcgtcccagaaacttatgttatcggtgatgcagttcgtgcgcgccgagcattagatgcaaccaaagaagcactagatgcggtattgcaattataatttatggttgtactcgctgttaagccggcgagtacaaacctacttggaggtatatgaacgtggaaaaaagaatttcaggatcaactcggcttctaagtttaattggtacacccgtagaccattcaaaatccccaatcatgtataattatagttttcaaaaagctggtttagattatgcgtatcttgcatttgatattcctgtaagtaaagtcgctgatgcaattgctgctatcaagacttttaacctgcgtggctctaacgtaaccatgccttgtaaaagtgaagttttaaaatacatggatgaactttcccctgctgcgcgaatgattggtgctgtaaataccattataaatgaagatgggaaactaaccggacatatcacagacggtcttggttttgctagtaatttacgggattctggtgtagatgtggcgggcaaaaaaatgaccatcatcggcgctggtggtgcagcaacagcaatccaagttcagtgcgcacttgatggggccaaggaaatcgccatttttaatattaaagatgatttttatgaaaaagctaaacaaacgattgcttctattaaacaagaagttcctgactgcatcgtacatatttatgacttaaatgacgcagcaaaattacatgaggaaatagcgactagtgatattttagtaaatgctacactcgttggtatgcatccacatgaaaatgaaacgcctgtcaaagatacgactgtcttcagaaaagatttaatcgtcaccgatgttgtctacaatccaaagaaaaccagacttttgctagatgcagaagctgctggttcaaaaactataggcggactaggcatgcttttatggcaaggcgcagaagcatacaaactgttcacaggtaaagatatgcctgtttcagaagtaaaagatttatattttaattaataaattcatcaggatttcgagaggagaaaaaaatgaacgcaaaaagattttatccaacagcaattgcactttattttacttattttattcacggtattggggtatccattcttggccaatacaaacaagatttcgctggagtatggggagcagacaagctttccgacggtacctttgatgtcagtatggttattgctgttatcgcagcactcggcctaggacgtttacttacactgccaatttctggacctttttcagataaatttggccgtaaaccttccgcattaatcggtgttggtttatatgccatttatttcatcggattagcatttgcaccgaatatgtatattgcttatgctttcgcttttgtaggcggtgccgcgaattcattcttagacactgctgtaacaccatccgttctagaaattttcactaaaaatggcgctattgccaatatgtttactaaattctctatttctatcggacaattcgtattacctttcgctattggtatggtagcagcggcgaatatgtctttccgtacactatttattattacgatggcattaattgttatcgacggtttaattatcgcatttatgccattcccaccaatgaataacaatgtgggcggcgaaaaagtaaaaccagcgaaaatgaaattcaatgcaactagttgggcaatcataggtataggtttcacttgtacttccactttccaactatggttaaactgtaaccaagagctcggaaaattatatggcatggctgatccaagtaagattcaatcattctactcactaggtactatgtgtgctattttaattacagctgttctcgtgaaaaaattcattttaccagtgcgaattctcattatatatccagcaattaagcatatagtcggtgtttgaacgatgtaaataattagtaacattaaagtagcaattgctggatatataatgagaattcgcactggtaaaatgaattttttcacgagaacagctgtaattaaaatagcacacatagtacctagtgagtagaatgattgaatcttacttggatcagccatgccatataattttccgagctcttggttacagtttaaccatagttggaaagtggaagtacaagtgaaacctatacctatgattgcccaactagttgcagcgtatccaattacaaatccaccaattaagcatatagtcggtgtttgaacgatgtaaataattagtaacattaaagtagcaattgctggatatataatgagaattcgcactggtaaaatgaattttttcaccagaacagctgtatttaaaatagacacacatattacctagtgagtataatgattgaatcttacttggatcaaccatgccatatattatggccgagcgcttggtgacagaataaccctaggaggaagggagccgtactatggaccccgctcttgatgaccgcccaacaatgggcagagagactgattacccatgcacacgtttttgtatagccggcaggtagacgaatgggaagtgaccccagcctcgagctggaagggtatgaggagtgcttagccaacgcgaatggtcaaatngatgccccaagaacggcgcggcatactaataaggtcccaaggag

SEQ ID NO: 6 - DNA, 213251 bp, Listeria innocua
tgcagacagcacaaaagcggatgaccaagttggtttaaacgttgtaaaccaaacaaacgaaggtctatatgcgcttaacaaagatggtattcctgccattgccggtgctgctgaagagccaaaaattagcgatgacaaaacagtttatactatcaaacttcgtgaagatgcaaaatggtctaacggagatcctgtaactgcaaatgactatgtttactcatggcgtcgtgcggttgaccctaacactgcagcaacatattcttacctatttgatgcaatcaaaaacggtggcgatatcgtagctggcaagaaaaaacctgaagaattaggaattaaagcagtagatgattatactttagaagttactctttctaaaccaactgcttacattaactcactattcgcattcccaactttcttcccacttaacgaaaaattcgttacggaaaaaggcgaaaaatatgcacaaaatagtgacaacatgttattcaacggacctttccaacttaaagattggactggaacaaacaaaaaatggacttacgtaaaaaatgataaatattgggataaagataaagttaagctgaaacaaatcaacgtacaagttgttcaagactccggtactggacttaacttatacaacactgacaaagttgaccgcacagtattaagtgctgattatgcagctcaaaacaaaaacaataaagactatgtaacagtgaacgattcttcaactttctacattaaatttaaccaaaaacgtgctggcaaagacacagtatttgctaacaaaaacatccgtaaagctattgcacttgcgattgacaaacaatcgtacactgacacagttcttaaaaacggatctaaacctgcaaacaatcttgtaccagaaggattcacttttgatccaggtaacaaagaagattatacaaaagaatctggtgcacatttagaatatgatgtaaaagaagcacaaaaagcatggaaagctggtttgaaagaattaggagttaacgaaattacagttgaattcactagtgatgatactgaaaatgcgagaaaatcttctgaattcattcaagaccaactacaaaagaacttagatggtcttacagttaaacttaaaaacgtaccatttaaagttcgtttacaaaatgaccaaaaccaagattacgacttctctatgagcggctggggtcctgactatcaagatccatccactttcttagatctattcgtaactgatggtgcacaaaacagaatgagttattctaacaaagactatgacaagattttaaatgatgcgtctgtaacttatgcagctgacgaacaaaaacgttgggatgaaatggttaaagcagaaaaaatccttcttacggatgatgtagctgttcaaccactttatcaacgttctactgcatacctacaaaaagactacattaaaaacttgcaaaaaaatccatttggtccagactacacttacaaagaaacatacttgactaaataaaatattagtctttaagaaatgcttgacggaaagagagagtatatttcgatatgctctctccttttgctgatgattttgatgtgttataataaaaaattaaagtatccttttctagtttatctagaacctaacattcgaaaaatgaagtttttttcctaactaatttgcacttttgcaataaaagtttagaaacgaagaaaaaggctcactaaacttgcgaatttggttaggaataacttttttatatatttattaaaactgggaggtgtagagatagatggttaaatatacgttaaaaagagtattatatatgcttataacgttattcatcattgcttcggttacgtttgttcttatgaaattcttgcctggtacgccttaccgtaatcaggagaaactatctgacgaacaaattcacatgatgaatgaaaaatatggactaaatgattcaattccagtccaatacttaaattatatgacaggtttggtaaaaggagatcttggtgtttccttccaacttgataatagaccagtgtctgagattttaggtgcactgattggtccatctgtccaattagcacttgaggcaatggtttttggtgttatctttggtattttacttggggtcgtagcggccatgtatcaaaataggtggccggattacacgagtacatttatagcaatactaggtaaatcagttccatcatttgtatttgcgactgtgttgcaatactggttaggagctaaattacaaattttcccagtggcaggatggggttcgtttgcagatacaattttgccagcgttcgcacttgctatgttcccgcttgcaacagcagctcgttttatgagaacagaattaatcgatgtatttgcatctgattatgttctacttgcaaaagcaaaagggaatagcagaactgaagtagcagtaaaacatgcgattcgtaatgcacttattcctttaattactgttttaggaccattatcggttgcactgatgactggttcccttgttattgaaaacatttatagtatcccaggtatcggaagtcagttcgtttcttctattcaaatgaatgactatccagtaattatgggaactacattattatttgctgctatgcttgtatttgttatcttggtagtagatattctttacggattgattgatccacgaatccgtgtgtctggaggtagaaaataatggcagaacataaaattgcaaaagaaagattccagccagcacacatccttgatgcagaagcggaaaaaattaatcgtccaagtttaacatttatgcaagattcttggcttcgtattcgtaaaaataaagcggctttagtttcacttattgtattagcccttgttattatcatggcgattgttggaccttatttatcacaaaatctaggaccaaaaaatgatattaatagacaaattactgaaaatgcaagtcttccaccgaaagttcaaggatttgaaaatatgccattttggaatggtcatcagtctattggtggagaagacgttgatatttataaacaaaataacattaaagagggtacttactactggttaggtagtgatacactcggacgtgaccaatttgctcgtatttgggctggtacacgtgtatcacttattattgctgttgttgcagcactatgtgatttaatcattggtgtaacttacggattgatttccggttatgttggtggtcgagtagataacgttatgcaacgtattctagaagttattggtgcaattccaaacttagttgttgttatcttaatgatgctgatacttgatccagggattgtttccattatcatagcaattgccatgaccagttggataacgatggctcgggtagtcaggggacaagtcttaaaacttaaaaaccaagaatttgttatggcttccatgactctaggagaatctactccgaaaattcttgtaaaacacttaataccaaatatttctgggattattatcattaacattatgtttagtattcctagtgcgattttctttgaagccttcctaagctttattgggttaggtcttccagcgccagcagcatctcttggtgtcttggtaaatgatggatataaaacattacaagtattaccgtatatgattctttatccatgtattgtactttgtatcatcatgattgcatttaacttaattgcagatggcttgcgtgatgcctttgatcctaaaatgcgcgattaaaagagaggtgaggaaaaatggaaaagctattagaagttaaagatttaaatatttcattccacacatatgccggagaagttaaggcgattcgtggagttaattttgacttatataaaggggaaaccttagcgattgttggcgaatctggttctggtaaatcagtaacgacaaaatcgattatgcgtttacttccagaaggtaactcagaaattaaaagtggccaaattttatttaacggaatggatatcgctaaagctcacgaaaaacaaatgcaaaaaattcgtgggaaagatatagctatgattttccaagatccaatgacatccttgaatccaacgatgacaattggaaaacaaatttctgaaccacttattaaacaccaaaaaattagtaaacatgaagctcataaaacagctcttcgtttacttcaattagttggtattgcaaatgcagaagaaagaattaaacaatatcctcaccaattttctggtgggatgcgtcaacgggttgttatcgcgatttcacttgcatgtaacccgcaaattctaattgctgatgaaccaacaacagcattagacgttacaatccaagcgcaaattttggatttaatgaaagacttacagaaaaaaattgatacatcgattatcttcattacccatgaccttggcgtggttgcgaatgttgcagaccgtgttgctgttatgtacggtggtaagattgtagaaatcggtacagtcgatgaaattttctataatccgcaacatccttatacatggggattaattagttctatgcctactttggatacagatgatgaagaattatttgttattccaggtacgccaccagacttacttcatcctccaaaaggggacgcatttgctgcgcgtaataaatacgcaatgcaaattgaccttgaagaagagccaccactatttaaggtgtcagatacacattatgcggctacatggttgcttcatcctgatgcacctgaagtaacgcctcctgatgctgtattacgtcgccaagaacagtttgcggaacttcatcctggcatgcaagctgtccatgcgaaaggggtagaagtagaatgactgaacaaaaagaaaaattattagagattcataatctaaagcaatactttaacaaaggtactgcaagcgaagtacgtgctgttgatgatatttcttttgatatttataaaggtgaaacacttggtttagtaggtgaatctggttgtggtaaatctacaactggacgtacgattattcgtttgtatgatgcaactggtggagaagttatttataacggtaaagatgtgcatgcacgtaaaagccgtaaagaaatgcttgaattccgtcgtaaaatgcaaatgattttccaagatccatatgcgtctttaaatccgcgtatgaaagttaaagatatcattgctgaaggtattcgtattcatggccttgctaaaacgcctgaagaaacgaaccaacaagtatatgagctacttgaaacagttggactaagcaaagaacatgcaggtcgttacccacatgaattttccggtggtcaacgtcaacgtatcggtattgctcgtgcgcttgcagttcaaccagaatttattattgccgatgagcctatttctgcactggatgtatctatccaagcacaagtagttaacttattacgtcaattacaaaaagaaaaaaatctaacttacctattcattgcccacgatttatcaatggttaaatacattagtgatcgtattggcgtaatgtactttggtaaattagttgagctagcgcctgcaaatgatttatatcatgcaccgctacatccttatactgagtcacttttatccgctattccactgccagatccaaattatgaacgtactcgtgtgcgtaaagcatatgatccaactattcataattacaaagatggcgatgaaattaaaatgcgcgaaattgctcctggacactttgtttattgttcagaagaagaagaagttatgtataaagaaaagcatgctaaactaactgctgaagctgctgttaagtaaaaataaaaacatcaatcagggtaaaatctgattggtgtttttttacaaaattaaaattctcatgaaattctcataaaaaagctgtttttttcatgtgattttagtttaaacaagttatagtaggggtatcatatacataacggcttgctaacaatggttttacatatttggaaagaaaaattttaaaattagtatatagaatttcacaaaattagtgtataatgaagtgtaagttctttaatgaattttccaaatagagatattgctagaatttcgttatatgaatgaaacaatacccgataaggagtgtgaatgtctaatggtaacgttatacacttcacctagttgcacatcttgccgaaaagctcgtgcatggttggaagaacatgatatcccttataaggaaagaaacattttttctgaaccacttagtttggatgaaattaaagaaattcttcgtatgactgaggatggtacagatgaaattatctccactcgttcaaaaactttccaaaaattgaacgtggatttagatagtcttcctttgcaacaactatttgaattaatccagaaaaatcctggcttattaagacgtcctatcattattgatgaaaaacgtttgcaagttgggtacaatgaagatgaaattcgccgtttcttaccgcgccgtgtacgtacgtatcaactacgtgaagcgcaaaaaatggttaactaagattgataaaagtggttgccgagaattccattcaattggattcttggcactttttttgtaatttaagtaattgttcttgaatttttttcgtttttcagctaagataataatccaccaaggaaaaatggtggtactattttgtaatatgagctacaatgaatttaaccaattaagtttcacccttcattgtcaatgactaagaaggaagggagagtgtgacgatggaaattgaacgaattaatgaggatactatcaagttttatatctcttatctggatttggaagagcgtggttttaatcaagaagatgtttggtatgaccgcgagaaaagtgaagaacttttctgggatatgatggatgagctgaaatatgaagaagagttctctcctgaaggtccgctctggatacaagtccaagccttaaaacatggcttagaagtattcgtaacaaaagctacaattggtggaaaaggcgaggacggttttgacgtcacgcttagctccccagatgagcttgcagaagaaaaaatcgaaaaactactcgaagaaaacttcaatccagtgaagaaagaatcacttggagaagatgatacgctagagtttattttagagttccgtgattttgaagatctcatttcactttcacgtgcaacaggactggaaaatttagtaactaagctatattcgtatcaagggaagtattatttgaacgtagaatttcctgagaataagtatgatgaatctaacattgacaatgccgttagtattttgcttgagtacggtttagagtcgaatttaactggttatatgctagctgagtacggaaaagtaatctttgacgttcctgcattaaagcaagtaagaaaatatttctaaaactttatttagaggacccatttgagttggaaaatcaaccaaatgggtcttttttgcgattttaaaaataaagcaggaataaagctgtaagatgtcgaatattagtattaaagagctaataggagagtgatatttatttttacagctaagaacaacaatggagatacttttactattccaaagatgaatgtagagcgaatcaagcaagaagaaagattgttttgtaaatcatgtgatagtcctgtaatgataaaagccggcgagattaaaataccgcatttcgctcatgagaaggcgactaagtgtgcatttgcttctgaaggagagagtgaggagcatttattagctaagaggcaaattatggcttggtttggctttcaaggaattcctgttgaattagagcattattttcctgcaattagccggcaagcggatatttatgtgagtgatgctactgtaatcgaatttcaaagatcatcggtcccaattagtgaaatgattcagcggacgatggattacttatcaattggattagaagttcattggatactcggccaaacaataaaaaaagaaaaaggacgtattagtctcactatttttcaacaagcgtttattcaatttgagcagaagttgggttatcatttttggcattattctgcaagcgacaagataactactctttattatcatctgacatttgaaaaaggcaatcgcttttttgctagtgagatgaaattttctagcaaagcaccgatgaatgaatggaagcagaaaatagctcgaattattacacgccatgcatatgtaaagcgagatagagaattagaaaggcagaaaatatgtttttactacgcgaagttcaaaaaacatggacaattcatgcaaaaattatatagtgcaggttattatttgcattatttaccgaaagaaattggtgtggatttagaagaacaatttttagtcattactcctgctgtagaatggcaattcgatttatgggaaacgttttttaatatgttggaaaaaggcgatacttttagtgaagaatgttttttagagaagtttcaatcagtagtaacacaaataatgacaatttggctttctccaaatgaatgcttgaaattaggaaaatcatacattgcttacttaataagcgtaggagtattatcagtagtgccagaaaaacgataccgagtgaagcgagttatgactttttctggtaatcgcgtgagtcgggtgtaaacatctgttttgcatttttagttattttggctcataataaaaacaaaatgactatggttgggggtttttatattgagtaaaacgaatgcattacctttaagagaagaagttccagaaaatttaacttgggatttgactactatttatccaaatgatgaggcttgggaaaaagcctttacagaattacaaaaaatcacagaagaaagcgatcaatttaaaggtcgtctagcggaaagtagccaaacgctttatgaagcattacaatttcgtgataaagcttatgatttaattagtaatttatatgtatatgctcatttgaaaatggaccaggatacagctaatgcgaaataccaaggattacatagtcgggcaggaagtttagttacaaaactaatgtctgcattatcttattatgatcctgaaattttagcgatggatgagagtgttttaaaacaatttttaaatgaaaataaagatttgcaactatatgcacacttattagaggaattaaacttaagccgaccttatattttaagtgaaaaagaagaggcattattagcgaatgctggcgaagttttgggtagttcttctaatacgtttaacacattaaataatgcggacatgaagttccctacaattaaagatgaaaatggcgaagagattgaaatcacgcatggtcgttatggtaagttgttagaaagtaatgacccgcgtgttcgtaaagacgcgtttcttggtgtgtattctgtttatgaaggattaaagaataccttagcatctactttaaatgggcaagtgaaaaaatctaatttttatgcttctacacgtggatataagtccgctcgtgaggcagcactttcaggaaatcatatcccggagacagtttatgactctttattaaaatcagtaaacaataatgctagtttacttcatcgctatgtaaaattacgtaaagaattgcttggattagaagaacttcatatgtatgatctttatacaccgctttctgatgatgttaatttggaattcacttatgaggaagcaaaagagattgtccttgaagccttgaaaccacttggggatgaatatcaatcgattttaaaagaagcttttgatagccgctggattgatgtgatggaaaataaaggtaaacgaagcggggcatactcttctggttcatatagtacaaatccatatattttattgaattggcaagataatattaataatgtttatacgctagctcatgaacttggacatagcgttcacagttactatacaaggaagaaccaaccatttgtttatggagattattcgattttcttagcagaagttgcttctacgactaatgaaaatttactgacggactatcttttgaaaaaatatgatgatccgaaagtacgcgcttatttgttaaatcattatttagatggatttaaaggaactgtattccgtcaaacgcaatttgctgagtttgagcatgctattcatcaagcagatcaagaaggagttgctttaacagctgattatttaacagaaacttactttgatattaataagaaatattatggtgatgcaattgtttatgatgctgaaattggttatgaatggtctcgtattccacatttttacatgaactattatgttttccaatatgcgactgggttttcggcagcatcagctttaagtgcgaaaattttaactgaaggtcaagaggcggtaacagcttatattgactttttgaaagcaggaagttctgattatccaattgatgtgttgaaaaaagcaggagtcgatatggcaacaccgaaccctgtggatgacgcgttaaaagtttttgaacaaagattagatgaattagaaaaactagtcaaataatacattgtgaaaattactaaaaaaagacacggttgcagatgatatgcatcgtgtctttttttatgtttttgggtagtagaaacgttcgagcggtagggtaaagaataagtataaaaaacggtatgtgaactattgaattatgtgaggttatatggtatattataaccgtgaaataaatcacaaacaaataccccctttatttgattgtgtgaatttctccttttgattgcgctgtaagaagccgtggcatttagctacggctttttacgttatttatgtttactaacttagaattaaaggaggattaaaaatggaatttgaagatgaaaagttgttacgagaagtccttctttttgctagaagtgtagatacaaaaattaatgatatgtcgcttgaagtgattgattttggggatcttcgcaattatacaaagaatgaagtattacttacactgtactggttggaagaaaatggatatttaacgagaaacaacaatattacagaaaaaagatatacaataactttaaaaggtgaattgttatatgaacattttctcaagataagtgagaatgagtagaacagtaaatatttattaatccgtggacaaacgttgccgtccatggatttttttgttgtgaaagctgttgaaaaataaaatggtggttgacatgataatcattatcaattaaaatgatagttgacgtatgaattttacatatacttttactccacaaatgtctgtgggggttttttataaatagatgttttttaataaagaagggagagttaagagtgaaaaaagtattagccttagttgcttttgtagttttgtttagtttttcttttctttcagctggtgtaacggcacaagctgctcttaaagacggaacttattcggttgattatacagtgcttcaaggggatagtgattcagtatcaatggcgaatgactattttgacaagcctgcaacagtgacagtaaatggagggaaatctactgttagtttgcaagtaaatcatagtaagtggattactggtctgtgggttgagggaaatgcggttagtgtaacttcaaaaaacacagcgagtgatactagaaaagtgtcattcccagtatcaactttgagtagtcctgttaatgcaaaaattaaagtggatattgatgatgacgggttaaattatcatcatgaatatcaaatccagttacgttttgatgaaggggcagttaaatcatcgggtgcagctgtgaaatcttcagataataatggtacaacaacgccagcaactacaagtgattcaaataataaagtagcaaatccaaagtctagtgattctagcaaaatgtttttatatggaattatttttgtggcagcggggacagggttagttttacttaaaagacgtgcgatttttaaataaagggggattattatgaagaaattatggaaaaaaggtttagtagcatttttagctttgacacttatttttcaattgatacctggatttgccagtgcggctgattctcgtttaaaagatggcggggagtatcaggttcaagtgaatttttataaagataacactggtaagacaacgaaagaatcttcagaagcggataaatatattgaccatactgctacaattaaagttgaaaatggtcaaccatatatgtacttaactattacaaacagtaactattggcaaacaatggcggtttcaaaagatggaactcgtcctgcaaaaccagcacaagcagaagtttatcaagatagctaccaagatgttcaaactgttagtacggatgcagcgaataatacacgtgtagagaaattcaagcttagttctttagatgatattatttattcttatatgcacattaaagtagatgcaattagttatgatcattggtatcaagtggacttaacaattgatccgagtacgttcaaagttatttctgaaccggctgttactacaccggtaactctggcagatggaatttatacgattccgtttgtagcgaaaaaagcaaatgatgacagtaattcaagtatgcaaaattattttgataatcctgcatggttgaaagtgaaaaatggtaagaaaactgttgcaatgacagttaatgataataaaacagtaacagctttaaaaacacaaatttctggagctttgcaagatgtaaaagtggtttcagaagataaagatgctaacacacgaattgttgaatttgaagtggaggacttaaatcaaccacttgcggctcatgtgaattatgaagcaccattcaatggttctgtatataaagggcaagcagacttccgatatgtttttgatacaacgaaagcacaagcggcgagttcttacccgggtagtgatgtaacacctccagtagatccaggtgaaacaaatccaccagtaacgaaaccagacccagatccaggcactactaatcctccagtgacaacaccgcctacaacaccaagcaaaccagtagtagttgaccctaaaaatttactaaacaatcatacgtactcgatagattttgatgtttttaaagatggaacaaatgaaacttccatgatggaaagttacgtgatgaaaccagctataatcaaagtagaaaataatcaaccatatgtttatttaactttaacaaatagtagttggattaagactttccagtataaacaaaatggcgtttggaaggatatggaagttgtttctggtgatattaacaaaaataccagaactgtaaaatatcctgtgaaagatggtacggctaatacggatgtaaaaacacatgtattaattgaaaatatgccaggcttctcttatgaccatgaatatactgttcaagttaaattagatcctgcatcaatcaaagatattacagggaaggatgtaacgttacaagaacctgtgaaaaatgatgacctgaatactagcaatttagcaaacaataataatgctggaccaaaattagcaaaaccagattttgatgatacaaattcagttcaaaaaacagcgacaacaaataacaaagctgaaaaaaatgcgaaaactagtgattcatcgagtatggcatggtatattacattatttggggcttccttcctttatttagcatatcgattaaaacgtaaaagattgagttaataaaactggtaaaagcgagttaggttggggttatcctttgcttaactcgctttaccgattttattttataaatgggggaataagtgatgaaaaaaatagctgtcctattattggtgttattactttttttagttggttgcgggaatgaagaagcggttcaaaagtccgaacaaaaaccggagaataatcccaaaattgtcgcgactactgtagcaattacggaaattatggataaactggacttgccgcttgttggaattccgactagttctaaaaaacttccggaacggtatgctgatgtaaaggaaacagggtcgcctatggggccggatttagagattattcggatgttaaagccggatatggttctttctacaaaaacgctagaagctgacttaaaagcgggttttgagggtgctaatttaaacgcggactttttagattttacaagtattgattctatgcaggctgaaattaagaaacttggtacagaatttgatcgcaccaaggaagcgagtaaactaaataacgatttaacaagtgagattgacaaggtgaaggcgaatgtagctaaaaagaaaaagccaactgtactaatacttatgggcgttccgggaagctatttggttgtaactgaacatgcttatattggcgacttggtcaaacttgctggtggagaaaatgtgattacgaaccaaaaggtagaatacttggcttctaatacagaatacttacaaagcgcaaatccagatattattttacgagctgcacatggtatgcccgcagaagtagtaaaaatgttcgatgaggaatttaaaacaaatgatatttggaaacattttgatgctgtgaaaaataatcgtgtatatgacttggatgaaaatttatttgggatgacggctagtttaaacgctccagaagcactacgggaaatggaaaagatgctttatgacaattaaacaaaaaagctattttggtgcagttgttgttttgctctttgggacgattttatgggctgtgcaggcgggaagtttgcagatgtctattccggcttttctaagagggctttttagtggtggaaatgagatggtggatgttgtaattgatttgcgttttccgcggattattattgccttgctcgctggggcggcgctttcggtttctggcttgttgcttcaagctgtgatgagaaatccgcttgctgatgctggtgtgattggtatttcagcgggggcgaagttttttagttttgttatcattttatttttaccggaattgtatttttggttgccacttttttcttttattggtggggctcttgcttgttttttagtctttttatttagttatcgttctgattttaatccacttcgtttcattatcataggtattgcaattaatgcggtttttacagggctgagtgatgcgttatcatctcaagtagcgcttgtttctagccaatctgcgagcagtgcagctagccttgcaatgaaaaaatggtctgatgttgagacattggtaatctatgtaacgattgggcttatttgtgcgctggtacttgctaaatggtgtaatgtattaggtcttgagaataaaatggctagaggttttggcgttccagttaataaaacgaggatatggcttgcgctgattgctgtcctacttgcttcaattacaacagcagtcgtcggtgttatagcgtttgtaggtttactcgtacctcatattgctagaaaattagttggtggtaattatcaaattttagttccattttcgattttatttggtgctttattgctattatttgctgatacacttggcagaacgttatttcaacaaatggaaattccagcttcagtaattatgctcattatcggcggtccattcttaatctttttaatgcgaaagggtgatttttatggaagtaagggacgttagttttagttataatggaacagatgcgattttgaaaaatgtctcatttactatccaaaaaaataaaatcaatacgattgttggaccaaatggtagtgggaaatctactttgttagaaattttggctagacttctttctcctaattctggtgaagttttattagaaggaaaatcgatttttgaatggaaagcgaaagaatttgcgcaaaatgtagcaattgttcatcaaaataatattcttccgagtgaattaacggtcaaagaattgctttattttggacggctaccttataaaaattggcgaatgacacgaacaaaagcggatgacgtagctgtagaaaaagctttgaagcaaacggagctaagtgaaaaagcagagaaatttgttgatagtttgtctggtggggaacgacaacgtgttttcattgcgactgcgttagcgcaagatacgcctattttgcttttggatgagccaacgacatttcttgatatgtactttcagctggaaattttagagttggtaaagcggttaaatcaagaggagaaattgactattgtaatgattttacatgatttgaaccaagcgcttacgtatagcgatcaattagttgttatgaaaaacggagaagtggtagcgaaagggaatcctgagactttactaacaacagagctaatagcggaaacgtatggagttgttgcagaggtgctttgtgacgcgaaaacagggaaatacattgttcctcagaagcgaaaggagttttagaacgtgaaaatgaagtcgtttttggggaaaagcctgactttagttgtattagctgtgtttcttttttctggttggaaaatcggtgcagaactttatgaaaataaccataaccgtacaattttagatgatgcgaaggcagtctacacgaaagaagtgactacgactaatgtgaacggcgaagtgagagatgaacttaaagctttgcaaaaattgaacaaagatatggctggttggctaacgattgctgatacagaaattgattacccgattttgcaaagtacggacaatgactattatttgcatcataattacaaaaatgaaaaagcaagagcgggaagtatttttaaagattatcggaatacgaatgaatttttggacaagaatacgattatttacgggcataatatgaaggatggctcgatgtttgcggatttacgaaaatatttggacaaagatttcttggcggcacatccaacattttcgtatgaatcaggccttgcgaattatgaagtagaaatttttgctgtatatgaaacgacgactgatttctattatattgaaacggaatttccagaaccaaaagactttgacaattatttgcaaaaagtgaagcaacaatctatttatcaatcaaatgtcaaagtaagcggcaaggaccgaattattacactttctacttgcgatactgaaaaagattatgaaaaaggacgcatggttattcaaggaaaactagtagcaaaatgaaaaagcgccaaaataggatgatttttggggcttttttatttttttgaaagggtgcgaacgatgaaattatatcaattaaccgataattatttacgggtgcaagaacttttggaagaaaataaaaccgaggctgtggaagatacgttagatgcgctcacagatggttttcatgataaagcagaaaatatcgttaaaataattaaatcattagcagcagatgccgaaatggcaggaaaagaagcaaaacggcttttaaaacgaaaacaagcattagaaaataatgttcagaaattaaaaacctatttacaaacagaaatggaacgaatggaaattagaaaaataaatagtacacttttcacgattcaaatacagaagaatccagcgagtgtcgaaatagtggatgaagctttgctaaaaccgttctttttactacaagaacctaaaattgataaaaagcgaattgcagaaatactaaaatctggtgaagaagtagaaggtgctagattagtagaaagcgaatcgattcgaataagataaataaaacaaccaaaatcgttaaagtttttaatgattttggttgtttttgttaataataactatttaaataagctaaaacgtaagatagttcacatttttgtaacaaactgtccctttttttgcatcttgggaacatttcacggtttcctcctatgaaataattaatgttaagtaaacaaaggaggagcggatgtgaatcgtttgaaaaaattagtaactatattaatttgtactttgcttatagtgtcacttcttccattttctgtttgggcagaagacaaagaaggagttgaaacgaacgtaggggaagcagctacggaagaaaaggttacgcaggaaacgacttcaaatgaaactacaacagagcctttgaaagaaacgacagtaaatgaaccaataagcacaaaatcatttccaactgggaattattctggggactttagtattaattctcaaaaagacgtgattgagtctggtcagacagtgaactataacatctatttaaaaataactggaccaaacacaatttataaaaatgctaaattggtaatcaatttaccgaaaaatggggaattcactcaatcattaagtgaacttaagattgccggagtaacacctagttataacaagacaacccgtcagcttgtgtataaataccaaacgctaaatagtggcgtggttgataaagtcattctcaagctgtctacgaaaaatggttatacgccaaatggaacgaaattagaagtaacaggggaatttagcgcggataatttatcagaaaaagtaacggagcaagctgaaacaaccgtgaatgcaacagccacaacagctttgtcaaatgaatttacgaaagtggaaaatagtatcaataataatccaagccaaggagatattgggatttggtctttcaacttaaatataccgaaaaagtctacagggagcctttttattgaagaaggaaagaaaattattattgaatatacgttagcggataagctagattatttgggagtagcaggggatacaccggagccaacaaaaatcgaaggacaaaaactaacttgggaaattgcagcacctacatatttggaacaagaaaaagcaactagtttacttaataagactttccaaattagaacgttcttccaaacaagcataccgaattttgcgactgtagaaaacaaagcggttgcaacaacgaactttattactttaactgatagcattgtggatacttcaaaagcatcagtttcagtttctgcaagtgatccagcgacaattccgccgactatcggaagcgtctatgctccagcccacagaggaccagtggatgaaaattggggaattgctactgtgactggaaatccagatataaaagcatatgatagtgcgaaattaggttttagtttgatgctaaattcggcaatgaatgactcaccttcctatgacttcatctactatgatgtttactacaatattgatgataatttaaatctggattatttccgaagtggcgatttttattttaaaccaaatgttaattatcccggttggccgcaactgaaaaaatcacctaaatacaatttactcgtgaaatatgatggtgataatgactggactacgttaaaagaagatgtagaactgagcaaaatgtattcgagaaaagaccttggaattccagatgataaacatgtgagtaaagtatggcttcatttcacgtatgcaccagctggaatgtacagcgcagatttatctttctttacaacagtcaaagaaggctatgtgggagaagttagaaataccacgaaaattaatatgtacggcgcagatagtcaaggttatatccattacttcgatgatacaaatccttggccggaaaattggcagaaatatgctggagaccggacggctcaaatcataccgcaaccaattgggaaaaataaatttgtccaaggatcggttgcatttgatgataccgatggaaatttgataaacattggcgataattcagtttctgttaatttagaaagcaataaagcttccatttcacgattaacaggtccttttgaagcgatggttcttttaccttctggcgtaaaaatgaaaaacacggatcaacaaggctttaatgtcagcgtgttaaatagtaattaccaaaattcaggacgccaattactaaaagttaaatgggacaaaaagacgcttttaccagcagaaaaattaactgcaaaaattaatgtgaccgtatcaaaagacactccaagtaatatgtctgttgaaatgtttggattcttgcaggatacagattttaatgtgccagaagtgacaggaactccaaccatttctgatacaaaaatggaaattgactcaaatgacattaatcaaaatgggaattcggaagagtctagaatcacatcaggaaaccattacattttaaatacgagtaatcatttgaaaattagtaaaaaagctaagggtaatctcgataaaggatacagtggcctggcaaatgccacaacaaattccatcgtatcgtatcaattattactagaaaatgattcggacgaaaaaatagccaacatggtattaatggatgttttaccaagtgaaaaagatttaggaattacagataacagcgaacgtggtagtaaattcaatttggagctaacgaaagcagtagcaattccaaatgaatggaaagataaggtcgaagtaacttatagtactgccaaaaatcctaaacgttcgggcgttctcgataagcacacgatttatccaactggttcagaacctctagttgataaccgagaagcaacagaagcagattggttaaccgcttcagaagtacaagattggtctaaaattcactcttttaaaatggagctaaaagaaggtattgagtggattcctgggaaatccatgaaaattcaatttgatttaaaaacaccaaagaaaaaccaaatagataaggaacttttaaatcagcaaacgaaaaaagaagaccgagctgcatggaattcttttgctgttgctgtaaataattctcaagtaattgagccggcccaagtaggagtggctttagatgacagtgttgcgccagttacggtgcaatatgttgatcaaaaccacaaacaaattgccagcccagaaacactaacaggagcttacggagaaaaattcactgcaaaacagaagaaaattactaactacacccttgtaaaaacacccgcgaatgtaagtggaacatttaacgaaaaagcacagacagttacttttgtttatcaaaaagtgacagccggaaacatcattgtcgattatgttgataaaaatggtgaaaaattagctgattcgattgttttaacaggaaaattaaattcaagttatcgaacttcagcaaaaaaaatctcgggatataaattgtatcaaacacccaaaaatgcatcggggaaattttcgaacacctcacaaagagtaacttatgtgtatgaaaaagccagcacgttttcaatatcctctaataaaggggctgacaacgtggaaaaatcggcaaaactaccacaaacgggagattctaagaaaactaatttatggtttattcttggaatgctattactatcaagtacttttgtgattatgaagaaaaaatgatttcaccagtgttttaaacgttttttaggtgtttgtgattagttttgttcaccaaaaagacacatattattttatattttcgcaaaaagtgattattgggtgcatttgtttgttacaattcaacaagtctataagggatttaacaacagttagaaatagattataggaggacaaaacgcagtgaaaaatatcagacaatggaaaaaactagttattgcaatggttattggcttgctagtattccaaaacgtttcacctgtactagctacaatgacagacgatgaaacagcaaaaacaacattaaaaattaccaaagaagataaagatacaaaagaaaaaatcaacggttctacctttgaaataaagaataaagaaacgggcaaaacaaacaatttaacaatcagcgcaaatggtgaggcgactatggattcacttttacctggtgactatcttgttaaagaaaaagttgcgccaaaaggttacacactagatgaaaaagaatacagtgtaactttagcagaaaaagaagaagtgattacttcggtttcagcaaaagtgcaagaagaaacaacgaaagaagcagcaacaccaacaccggttaaaaaagcaacacaaaatgcaaatctaaaagctgctattacagacaatatttttaacaaagtaacgctaaaagatggcaatggtgatgaaattaacacatcggaccggattcaaaatggtagcggtgttgtgcttaacatgaattttgcattctctggaaaaaattataaagcgggggatacgtttacaactgttttaccagatgctttcaactttgggaataaaaacctaagtgggaacttcttaccttccacagaagcagaatggacacttgacgttaaaacgcgtgaacttacgattactttcttaaaagatggaattcaagaaggcgattatgatgtgaatatcagtacagccttcaaagtatttacatcaacagaagaaacaatacaagaagttgttttcaagacagctgggaaagatactgtttatcaaatcgaagtagttccagttgttacgtacccaactacagtatctgttacagcaaatccaggagttgttaatccaacaaaaggacaagttgatgccaagttcaacttaacaaaagaaaaagatgctaagggtgagctgaaacttaatgattatgcttctggtggaacaacaactattgataaagataccatcaaagtatattcgagtgatgttagtgctgggggaaccttcattggtacgaaaaaattacttgttgaaggaacagattatacattgacatattcttcgacagctttagtagtttcgcttaatggtgggcttgctgggaaaggctaccaagtaacatatgaccgcacaatcaataaaccaagtgattcactttcgtacatgtctacccaagcttacacggttggagattctggtatactatcaactaattcttcttatgtctatttagcgatgaccaattacaaacatttggagaaaaaagctacttataatggtacgacacaaagtattgattgggtaattaatttcaactatgaccaagatgaaatttctcctactactgtacttaccgatgtgttagcagataatgatgtagagtatgttgcagattcactcaaaatcaaacgcgtaacatttaatacgacaactggtgtgccaattattggtagtgatgcatcaagcgactggacaacatcaacaatctcaaataatgggaattttaatttaacgtataaaaacactaatacaaacgcatatcaaatcacttattctactaaaataactgattttaaagatcgtaaaattaaaaatgaaattacggatgaaaatggcgtttcagctgatgcaaccattgctattcaacctgatttgctgaaaaaagaagcaggaagcattgattacttcaataatacaatgagttggaaaatcactgctaattcagacaaaattaaaatggataatcttaacattacagataaattttctacaggtataaaaagcctgaaaagctatactgttcgtgcttatacagataatttcactagcgtagtattaacagaaggaaaagactttactattaatgagaatgtcactccagcagggttttatatacaattaattggtgattatgcttctacagataaaaaaattgtagtagatattgttactaatattgatttgtctgatgtgacgaagacgattgataataaagcgtttatctcttactatgatgggggaactatcaaatatgtggaagaaataactgcttcagctacaccagatgcgaaaatgatgacaaatggtgggaaatacggtgcgtacaattcaacaacaggaaatatagattggattgtttctgcaaatgcgatggcgaaaagctacgataacttgatttttgatgacacaatcccgactggattaacatatgtagaaggctctttacaatatcgtaatgtggagtcatcaactgaaatgatgagtttacaaattccacttaattctactgggacattggccaaagcaggggataaaaattatccaaccaaagtagatacaactggcaataaaatacatttagaatttgccaatttagacaacactcgtgtatttattaaatatagtacaaaaccagatgaaaattggtatttctataaatatgtgacgaatatagcagaagttactgataatggtacagataagcacacatattcttatcaagcctatgcgagtaaagttttcaatgcgatgacaaaaacagcttccattgattcaacttataataataaagttaactggactgtaacacttaataatatttcaaaagatcgtcctattaataacccaacaattactgatacgatgaaaaacggaacaacaggagcgcaagttgtaaaaagtagttttagagtaattaatgaaacaactggggacgatattgactcaaaatactatgatataacgtttacagataaagatttcaccatccagtttaaagattacaaagcaacagacccaatcaaagtaacctatagtacagttagtttgatgtcaggtttgattagtaacacggctacaacagcatcacctgattatggtagtctcccaatgtcatacaaatctagaacaacgaatatttctccagccttcaccattggtagtggcagcgggacggcgacaattggttcacttgaaattaccaaagttgataaaaaagataatacgaaaaaactaacaggagctaaattccaactttacacgcctgaaggagataaagctgggcaagaagcaacaactgattcagaagggaaaatcgtcatggacggccttcaatcaggaaaatataaactagttgaaacagcagcgccaacaggatatacaattagtgatgaatacaaagatggtaaagaaatcacgattactgctgatgtagcgacgagcgttacaattgaaaacacagaacaaactggtagcgcggttctgcaaaaagaagatagtgtaacaaaagatgctatctctggcgcagaattcgaattgcaaacagcagacggaactaaagtatccgaaaacttagtaacagacgcagacggtaaaatcgaagtaaacgatttagcaccaggggattatcaatttgtagaaacgaaagcaccaacaggctatgtacttgatgcaacaccaacgaaattcacggtggaattcaaccaaacagcggcaatagttgtaacaaaagaaaacacagccaaagctggcagcgtagttctaacaaaacaagacagcgcaacaaaagctacgatagccggagcagaatttgaattacaaaaagcagacggaactaaagtatcggaaaacttagtaacagatgctgacggtaaaatcgaagtaaatgatttagcaccaggggattatcaatttgtagaaacaaaagctgcggcaggctatgtattagattcaacaccaagcgaattcacaattgaatttaaccaagataaagcagcagttgtaacaaaagaaaacacagccaaaactggtagcgtagttctaacaaaacaagatagcgtaacaaaagctacgatagccggagctgaatttgaattacaaaaagcagacggaactaaagtatccgaaaacttagtaacagatgttgacggtaaaatcgaagtaaacgatttagcaccaggggattatcaatttgtagaaacaaaagctgcggcaggctatgtgttagatacaacaccaacgaaattcaaagtggagttcaaccaaacatcagtagtagctgtaacaaaagaaaacacagccaaagctggtagcgtagttctaacaaaacaagacagcgtaacaaaagctgcgttatctgatgcggaatttgaactacaaactgctactggaactaaagtaaaagataatcttactacgaatgcaagtggtgagatagaagtagctgatttagcaccaggcgattacaagtttgtagaaacaaaagcaccaacaggctacgaattagatgctacaccagttacatttactatcgaatttaaccaagcgactgcagtcaaagtaacgaaagaaaatgttgcgaaaactggtagtgtagttcttactaaactagatagtaaatcaaaaagtaatttagctggggcagagtttgaattacaaacaaaacttggtgtcagtttgaaagataaggtagtgacagaagcaaatggtcagttgcaaattgataacttagcaccaggcgactaccaattagtagaaacaaaagcaccaacaggttatgaacttgatgcaacaccagttgaattcaccattgaatttaaccaaaaagatgcagttcaagtgactaaaacgaataaaatgtctactggatcagttgtgttaactaaaactgatgggcaaacaaaagcccctcttgcagacgcaacattcaaattagtagacgcagataataacgtcacagaaaatctaacaacagatgcttctggtaaactggaaataacaaatttagctcctggtgattatcaattaattgaaacaaaagcaccaaaaggttatgaattagataccgttccagtcgatgtgaaaatcggttttaatcaaaatcaagtgcttcaagtaactaaaacaaatattaaaactattgtaagcggcaaggtaatagctgaatttgttgatacaaaaggaaatgtattagcagaacaagagattcatacaggtatagtcggggaggaatatgtaaccaaagcgaaatccatcgcaggttataaactaacgaaagatcctacgaataaagttggcctatacaaagaagcagatcaaaaagtaacctttgtatatgagaaaaataaatcatcactcgttgttgatcctactaaaccaattaaaccttctaaaccaacaaaaccagtaaaatcaacagtaaacccttcaaaacaagctacagtgaaaaaagcacaaagtcttccttcaacaggagatgattccctagctaatctcatcattacgggattattcgctagtgcacttggacttttcttactaagaaaatccaaaaaagtaaatgattaataattgtagtcgctattctgtgaagaatagcgacttttttatttattatatatagaaagaattccatctaataatgcagaaaaaggagatttagtattgaaacagtatatttttagtataaagtatactgtttttgttcactgaaaagccataataaatcgattttttggttctctaagaacattttcgacccctcgtcttttgttataattcaacgagtcataggtcttatacaacagacatagcttgcataggaggaaaacagcttaatgaaatatatggtaaaatggagaagtttttttatcgctgcaattattggtttactcgtttttcaaaacttttcgccggtattagcaacgattatagatgaaaaaacaaaaatgataacgcttaaaataattaaagaagataaagatacaaaagaaaaaatcaatggttcttcttttgaaattaaaaataaaaaaactggagaaacaaaagaagtttctataacagaagacgggacaattgtagaaaattcactctcagaaggagaatatattgttaaggaaaagaaggctgccccagggtttactttagacgaacaaacttataacgtcaccttagctgataaagatgaggttataacttctatttcaaccaaagacgaagcagaaaagactccaattgttacagaacaaccctctaaaaaaggaaatctgaaagcagttatagcagataatatttttactgcagtaaaggtagaaaatggaactgggaatgaacttagtacgactaaccgcataaaaaatggcggagcagtagttctgaaaatgaattttactttttcggggaaaaactataaagctggagatacatttaaaacggttttaccagagacattcaactttggaacaaccaatttaacaggagatttcttgccttcaactgaagcgaaatgggacctgaatgcaagcactcgggaattaactattacctttttaaaagatggtgtgcaagaaggtaattatgatattgagcttagtactgcgctaaaaagtttctctgagacagataaaacaaggcaggaagcagtttttaatacggcgggtggtaatacaatttaccagttagaaattattcctgaagtagacaaggctacacaggtaatgctagaagcaactccgggtaaactcaatcctgataaagctaccgtggatgcaaggtttaatttaacaaaagaaagtaatgagctaggggaacttaggctatcggacactgcttacggaggttcgactattattaataggaatagtattaaggtctactcaacagatattagtgctaaaggaacattcattgggtcaaagcaattacttaacgagggtacagattatgaattgatttatgcaccttcaggattaacaattaaattaaaagaaggtctaaaagcaaaaggatatcaagttacctatgagcgttccattgataagacaaatacgtctttgactactttagggacttcagcaacaacagttggaagctctggcatgttatcaaatggaagtatgaccatttcagtaacaataaaagcatatgatcatttaactaaaaaagcagtttataaccctgtaactcaatgtattgattggacaattaatgttaattatgatttagcaaatttgacacctgatacggttttaaaagatgtattaacagacgataatgttagttatgtcgcagattctttgaaaatcaagcaagtcacttttaatgaagaatcaggagaagtagtaataggcgaggatgcgtctaatgattggactgtttcgactatatcagataacggtagttttaatatgaactacaagaaaacagataaaaaagcgtatcaagtaacgtattctacaaaactaaccgattttagtccacgaaaaattaaaaatgaagtaacggatgaaaaaggtgttaaagcaacagaaaactttgatttcaagccagacttactaaaaaaagaagctggagagattgattattataataatacaatggattggactattacagttaattcggaaggtattaatatgcaaaatattaatatcgttgacgagttttctacaggtgtaaaaagtttaatcagctacagtgtgtacgcttatccttctgattcaggctataacatattaactgaaggtagagacttcaccatccaaaaagacgtcacgccagatggttttaaaattaaacttatcggtaactatgcgacaacagataataaaattgttgtgaaaatgaaaacaaaaattgatttaactgatggagcaaacacgctaaataataaagcctcgttttcatattttgacggtagtttaacccagtattcagaaacaataaaggcagaagcaacaccggaaactagtattttagctaacggtgggaaggtcggcaaatggaacccggcaactggtgaaataaattggattgtatctgtcaatgcaatggggaaaaaatataataaattggttttagatgatgaatttctggatggtacaacctttgtagagggatctttacagtatcgtaatgtagttaattcatccgagctgaccgacttgagtattcctctagagataaaagggactttagcacaagttggggatgctaattatccaaccaaaatagacacatcagccaataaaatacatttagaatttggtaatttagatactaatcgtgtatttgttaaatataaaacaaaaccaaaagataattggtttttctcacagtgggtaaacaataaagctatcgtttcagataatggagcagatgaacaaatatacgaaacgaaagagtttgcttttttgcaaaatgaagttattaaggtagctggaaacatcgatagtacatttggaaataaagtgaattggaatatggaacttttgaatattactccagaaagaacactgtctaatccagttattaccaatcgattggaacaaggaaatacgggtgctcagtttattaaaaatagttttcaagtaattaatacaaaaacgaacgaaccgataaacgaagaaaattatgatattacttttgaaggaaatacctttaccattcaatttaaaaactatactgcaatggcgccaatcaaagtaaactacagcacaataagtttactttcaggaccaatttctaacgaaactacggtagaagcagaagattttagtaatgtcccaatgttttttaaaaagagaaatgtggcagtatcaccagtctttactgtgggaactggatcaggtattgcaacgattggtacgattaaaatcacaaaagtggatgaagacgatactacgaagaaattagaaggcgcaaaatttcagctttacacactagatggtgaaaaatctggacaagaaataacaactaattcagaaggtgaaattttactagatggtattcaatctggaaagtataaattagttgaaaccaaagcaccagaaggttacaacattagcgatgaatacaaagaaggaaaagaaattactgtaagttcatctggtgaggaacttcttttaaccatcaagaatgcaatgaaaaaaggcaatgttattttaacgaaaaaggacagtgcatcacatgaagtattagcagatgccgagtttgaattacaaaacgccactgggtcaaaactaaaagaaaaactaacaacagatgcgagcggtaatatagaaataaccgatttagcacccggtgactataagttaattgaaaccaaagcaccaaccggttaccaattagacgcgacaccagttaatttcacgattgattttaaccaatcagaagcagcgaaagtaagcaaaaccaacacagcaaaaacaggcacggtaatgctaacgaaaaaagatagcgcaacaaatgccgagctagcagatgcaacatttgagttgcgaaacgaggacgaaacgctagtccgtgagaatctcgtaacagacgataatggagaaattagtgtagctgatttagcacccggtgactataagctaattgaaactaaagcaccaaccggttaccaattagacgcgacacccgttaatttcacaattgattttaaccaatcagaagtagagaaagtaagcaaaaccaacacagcaaaaacaggcacggtagtgctaacgaaaaaagatagcgcaacaaatgccgagctagccgacgccacatttgagttgcgaaacgagagcgacacattagtccgcgaaaatcttgtaacagatgataatggagaaattagtgtagctgatttagcaccaggcgactataagctaattgaaaccaaagcaccagctggttatcaattagacgcgacaccggttaatttcacgattgattttaatcagtcagaagcagcgaaagtaagcaaaatcaacacagcaaaaacaggcacggtagtgctaacgaaaaaagatagcgcaacaaatgccgagctagcagatgctacatttgagttgcgaaatgagagcgacacattagtccgcgaaaatcttgtaacagatgataatggagaaattagtgtagctgatttagcgccaggcgactataagctaattgaaaccaaagcgccaaccggataccaattagacgcgacaccagttaacttcacgattgattttaaccaatcagaagcagccaaggtaactaaaaccaacaagaaaaaaattggtacaattatagttaactttatagatgtagacggcaatcaattaaatgacaaggaagtgcatactggaaatgttggtgaagaatacagtgtgaaagctaaagaaatcgttggccatacattggttaaagatcccgctaacaaaaaaggtatgtataaagaaacttcacaagaaataacctttgtctatgagaaaaaggcaatgccgattactgtggaacctactgaaccatcaaaaccaacagaacagctaacagaatcagctacagtagcagagccaaaacctataaaacaaaacattaaaacaaccaacaaatcaccaaataataagagaaaacttccttctacaggagatgagttcccttatacaatgctattcactggattgtttgttagtgttgctggagtattcttcttaagaaaacctaaacaaataaaatagcaaaaaaagctatcctaagaaatttaggatagctttttcatttaaatccaagcatcttcttcattttttgttaaaagcatttgaatacctcgaacaatattaaagataaacagtccaacaatagctattagtgtaaatataaataagctaccggtaacgaaaaatgatacatttgcgagtaagccgccgtttgtcaaagctgtaacgaaaacactggagaaacaaaggaaaccagcgatagtcggaataatgtgagttagtaatgcaactttagcatgatgagtaacatcctctgatttagcaaaaatccaaatcaatactggcacaataactggtgcaaagaggatactaaaataacttaaagcatttaaaatacgatgatcattcataatcaacacacctttctaagatgtctttattatagcaaggctaggattatgaagccctcgtttcaagttacaaagaaggaaaataatataacaaatatgtaagaattatacgattttgtttttagcctgaataatatgaagaagttgctctgacataaacgccggcgaatgagcaaaactttcttctgcccaaaaaacaatcatgccgaaaatcgcatgtgcttgataagacgcaagtaacatgggctctatactcgaactgtcaactgagtagtcaaagtcattcaaaatcagttctcgaataacgtcacaaacttgattttgaaaactgggacggattgtcgattttataacttgtgtataaaaagcttgatgaccataaacatgatcaaaaatttttatcatggaaggtgtaagtgtttgaatggaaaaaggcgtcttatgtgtataagggtcttgatacgctttttgtaaatcagccagcacttcatcaatgatgctatctaaaagttcttctttgtcacggtaatgtttatagaacgtgcctcggttaacatctgctactgtaacaatatccgtaatcgtaatctgttgaaaaggtctttcatcaagaagagtaaataaagcttggtttaaggcttgctttgtttttttaatccttctatccatcatttgaaactcccatccgagaaaaatttcctattactatacatataacgcaaaagtgttgcttaatcaacaaaacaggctttctttacatattgaaagcgctttatatcggggctataattgaaataagaaggagtgaaatttaatcctttttagcgtatcaaaagtgaaggaggaagtaataatggggaaattagctggaaaagtagcagttgtaacaggggcagcttctggaatggggcaacaaattgcggttctttttgcgaaagaaggggcgaaggttgttgttgcggatttaaatttagaagcggcacaaaaaacagtcgcattaattgaagacgaacaagggacagcacttgcggttgttgcgaatgtcacgaaacaagacgatattgaaagcatgattaacaaagctactgagacatacggaacgttagatattttagtaaacaatgcgggcatcatggataattttgtcccagccggcgaattaacagatgagctttgggataaagtgtttgcgataaatacaactggagtaatgcgagcaactagaaaagcacttcatatctttgaagaaaaaggacagggagttatcgttaatatcgcatctgctggaggcttgtttggctcaagagcaggggcagcgtatacagcttctaagcatgctgtcgttggttttacaaaaaatgttggtttccagtatgctaataaaaatattcgctgtaatgctatagcacctggagctgtaaatacaaatattggtactactatttatgctccagatcaatttgggcaagaacgagctatgattggaatgggaacaaaccctcgcgctggtgatgcctctgaaatcgccaaagtagctctatttttagcttcggatgatgctagttttgtaaacggaacggtaattactgcagacgctggttggacagcttactaaaaaataacaaatccgcatgagagaattattttcttttgcggattttttatgagaaaatagaaagatggatattttttaacaacttcgcatttaggggttgtttctttgtatagagagaatgaatagttgtgagcataatggggtattaaataacaaagtgaaaggcggggatgctttttggttgaacagttggtaagtaatgcagcgatattactcgcaggattttatattatttctttagtctataaagagccaattacgaaagaattatcgataaatagaaaaatggtgataggtgtatgggcagggctgctaggatttgcactaatgatttttgggataccgatttcaaataatgtaattgttgatttgcgtcatattcctattattatggtgggcttttacggcgggcccattccggcaattgtttcggcggtcattattacaacttcacgctttttaatttcagtgaattctgcagcagtgatggctggtgtaatcatgatgttgattggcattataacagctctttttagcaaacgcttagaaaaatataatatttggggcgtttttattttgaatattattgcgtgcggttttgtagtcattaatttacatttgattttagcaaaagagccagacttctgggttaatatgtttacatttgtatctatcgcgcttgtaattggcgctgtttccgcaggtttaatgaagaatatgattaaatcaaagcaattgtttcaaaaatacgaacaagactctacactcgattatctgacgcggttatcgaatgtaaggcaatttgatgaaaaaatcaaccatgtgatggacgccggaagtagacaagtgacattaatgttaattgatatagattactttaaaaatattaacgatacatacggccatgacgctggtgatgccattttgaaacaattagctattattttaaaacgaaacacatcagatggttctgaggcatttagaaatggcggggaagaattttccattgtcttattagattgtccgattgaaaaaggtaatttttttgctgaacaagtgcgaaaagaaacggaagagcacgattttatgataccgagtggaaaactagtgaaaattacgatttcagttggtgttagcagtagtaaagatggtgctaatacaagtgaaggtttgtttaaatctgccgatgaagccctgtataaagcaaaattaaccggacgaaatcgtgtttgtattgcagatggaaattagcttgtcgcaaaaaaacgagtacttctagcagacgtcttatgttataatagattgtgtaatgatgagcaaataactaggaaactagtccaaaaggatgagcttttaatgtttgacttaatggataacttgctgggagtacagtcatttggtgaattaaataaggacatgccgacgacgctttttgtcactgatgcagacggtaatattttaatttctaataaattcactgcgcttacggtcggaatgtcgcttgaagaattacttcgttgtaatgtaagggacttagtggaagacggtgtgtacaatgattctgtcacgctagaagcaatccgaaccaaacaaaagaaaacaaaagttatcaatacgaagaaaggttttagtattcgttcgacttctacgccaattctctatccagatggcaccgtgcatttagttgttacgatgtcagatgaaacgcaaccagatagttttaaaacatggcgtggtgaggcaatttcgggcaataaagagtcacttcttcttgaagattataaagaaaatgatggcaccgtgatagtagcggagagcgtcgcgatgaaacagatagttcgagtatgcaatcaaatagccccgtttgacagtaaagtcttattatacggggagtccggtactggtaaagaagtcttgtcgcgctatattcatgaaaaaagtgaacaagctgctggaccatttatctcgattaactgtgcggcaatcccaaaagcattatttgaatctgagcttttcggacatgaaaaaggttcatttaccggtgcggatattgaaaaacccgggatgcttgagctagctgatggcggcacactatttttagatgaaatttctgaaatgccgttagagcttcaagcgaaaatgctccgagtgcttgaaactggcgaggtaagaagactgggctcaacaactgagacgaaacggcgctttagacttatttcagcgacaaatcgaaaccttggcgaaatggttgaaaaaggaacgtttaggcgtgatttatattatcgtattaatgtagtgccggttcatattccagcacttagagagcgaccgcaagatattattggccttgcacgtcagttcattcaaaaatttaatcaaaagtatcaaaaagattttcaattaagcggcgataaaacgaaagaattactttctcataactggccaggaaatgtacgtgaacttagaaaccagattgaacgcttagttgttatgtctggtaataaagaagtgacagtttctgaaacagatgattttgcgctagacttacattttaaagagcaaacgaaaaaagaatcacttcatttaaaagattatttacaagacgtggaaaaacactttatattgcgagtgctcgaagaaagtgatggaaacgtgacaaaagcggctagtgtgcttgggattcatcgctctgttttatatcgaaaactaaaaacacttcattaatttagaaaacctaatcggaatacgcgattaggtttttttgttgcattttcgcgactattttttgtaacagtgctaatttttatgtcgcttttttgcgacgattaataatgcttaaatttaaaaaggttgatataaagccattttaaatgttggcatgaaagttgctttataagtaagtgcgtatcattacaaatatatgtgaataattgaacaataaggagtgaggaatttgtcaaaagtaataaaagcaagtgaagcagcaaaattaataaaagatggcgatactgtagcttttagtggtttcggtttagcttgtgttaatgaagaaatggctatcgcggttgaaaagcgttttttagaagaaggggctccgcgtaatctaaccgttatgcatgctagtgcgcttggtgatcgcagggaaaaaggaatgagtcattggggacatgaaggattaattaaacgctggattggcggaattgcgattgcttctcctaaaatggcgaaactaattgaagaagacaaatgtgaagcatacaatttaccacaaggtgtaattacgcaactttaccgggaaatcgcagctaagcgaccaggcgttattacaaaaattggtatgggaacatttgtagacccgcgtattgaaggggcgaaaatgtccgcgagttctaaagataacttagtagagctattgacgattcaagacgaagaatggctattttatccaagttttccaattcaagttgcactcattcgcggaactgtggcagatgaatttgggaacttaactttagaaaaagaaggcttacatatggaagtcttgccaattgcgcaggctgttcgaaattcaggcggaattgttatcgctcaagtagaatctgttgcgaaaaaaggatcgcttaatcctaaagatgtaagagttccaggaattttagttgatcatattgttatttcagaaccagaaaatcatttccaaactgaaaatacacagtataatccagctttctctggacacattcaagttcctcttggcgatattgagccacttgcgttagatgaccgtaaagtgattgcgcgtcgttctgcagcagaactagaaccacaaaccattttaaatttaggtgtaggaattccagtaaatgtttctactgttgcagcggaagaaggcgtgagtgaccaattaatactaacaaccgaagcaggatctgttggcggtgttccagctggtttagcagatttcggtcatgcgtataacagtgaagctattgtcgatcatcattcgcagttcgatttttacgatggtggcggacttgatttatccgtacttggtttggcgcaaacagacgaatccggtaatgtgaatgtcagcaagtttggctcaagagttgctggctgtggtggatttattaatatctcccaatcagcgaaaaaattaatttttgccggaacttttactgcaggtggattaaagacgcgagtagctgacggcaaactagagattttacaagaaggaaaagctaaaaagtttatcaaacaagttcaacaaatcacatttagcggcgaatacgcttcaacgaccgaccaaacaattctctatgtgacagaacgagctgtattccgtttagaaaatggcaaaatggttctaacagaaatcgcaccaggcgttgatttagaaaaagatattcttggacaaatggaattcgaacccgttattgcgagtgatttaaaagtaatggatagcggtatgtttagcgaacaatggggtggcttaaaagctattattgaaaaacaaacaagagagggagtatctatatgacaaaagaaataaaccgttggggagtcttgattggctctgttggtgttctgctttgtaccggtgcggtatatgcatttagtgtttttgctggaccgcttagtgctgctcatggttggacaattccacaggttatgatggcatttacaattaatgcggcgattgggccgattccaactattttaggtggaattttaacggataaagggaaagcaaaatgggccattttaattgggggaatcctctttgggcttggttttgcactgacaggttttgctacttcaacgacgatgctttacttgtcttatggtgttcttgctgggcttggacaaggttttgcgtattcaggttgtcttagtaacacgattcgtcttttcccagataaacgtggtcttgcttctggacttattactgcaggaatgggtggagcgacaattattgctgcaccgattgcgaaccacttaattgaaacatataacgtaatgacagcatttaaaattatgggagctgtttatatcgcagttgtcattggatgtagtttccttattcgcgtcgcaccagctggctatgcaccaaaaggttggacaccacctactggaaatgcagctggtatggtaaatgtaccttggactggaatggttcgaacagttactttttatctgattcttttaatgctaggtattggcgcattctcaggtctgatgattgcttctaatgcatccttaattggtcaaaatatgtttggcttaacggctgcatcggctgctgcttacgttagtatttattcactaagcaactgtttaggtcgagtagtttggggcgctgtatctgaccgtctaggtagatctaatacattaatgattatctatacagttattgctttatctttactagcacttgcaacgcttcaatcggttgttgggtttgttatcggaatcattggacttggactttgctttggcgggacaatgggcgttttcccatctatcgttatggaaaattacggtccgaaaaatcaaggcgtcaactacggaatcgtcttcattggttattccacagcagccttctttgcaccaaaaatggcagctcaaatcgccggtcaaaacggtggcgacttcacacaagctttctatatagctatcgcacttgctgctgtaggactttgtattaatattgtttataaattacgtgagaaaaaacaaccaacgaaagaattagcgtaaaaatagagaggagaaaagaaaatgagtttaactgaaatgctacaaatcaaatatccaattttacaaggggcaatggcacaaattgccacatatgaattagcttccgcggtatcaaatgcaggtgggctaggaattatcgcatcaggtggaatgtcagcagacacattgcgagaacaaattcgcctttgtaaagaaaaaacaacgaaaccgttcgctgtaaatatcatgctgatgatgccaaattgtccagaacttgtcgatgtcattattgaagaagatgtgcgagttgttacaactggggcaggaacacctaaaccatttatggaaaaatttaaagcagctggaattaaagttatcgccgttatcccgtctgtaaaaattgcacaaaaaatggaagaaatcggtgtcgatgcagttgttgcagaaggtacagaagcaggagggcatgttggtgaaacaacaacgatggcgctagttcgtcaagtcgtttcagcagtaaatatccccgtcattgcagcaggtggtattgcagatggccacggaatggcagcagtttatgcattaggtgcaagcggtgtccaaatcggtacacttttccttgttgctgaggaatgtccggttcctgctagcttcaaacaagccgtacttgatgccactgatacgagcacaactgtaacaggccgccgaaatggtgcgccagttagaagtattaaaaacccaatgattaagaaatatgtagaactagaaaacgaaaatgcttctagagataaattagaagaattaacacttggctctcttagaaaagcagtccatgaaggtgacgttgaaaatggttccgttatggctgggcaaatttgtggaatgttaactgaaattcgttccacaagtgatattatcgaaaacctgatgaaagagtcaaaacaagtcgcaagtaacctagtcattcaataataaaaaagagccagcagaatctattagattttgctggtcctttttcatttgcgtcgatacattttggttaaatctaccattaaataaacgagcaatactgctgtaatgataacagcgataagattagctacatcattatggaatagaaaactaatcccattgatggctaatgcaattaaaataattatgaaatattttatcattagaagtctccagttctcttcctaattataaagcgccatcttgaatgatttctgttttataaccatctggatctgttaagaagtaatagaatggatcttcacctggaagtccttttaagtctgtgacagtgtagccagcttctttatgttcctcaagtaaagcacgtacatcaggaacaccaacagctaaatgaccatagccgtttcctaaatcgtaagcttctttttgatcatagttgtaagttaattctagttcaaaaccgccttcttcaaacgccatataaactaaagtaaattcgaaatcagggaaatctttacgacgaacttcttttaaccctaatgctttttcataaaaagcaatggattcagttagattttttacgcggatacacgtatgtaacatttttgcagtcattttttcttcctccttttaaacttctttcttcattgtagtatatctcggaagtgaatacaaacaaggaatattgatggaagtaaagccagtttttcggtataatgatgaatgtgaagaaaggcggaagtgaaatgacaaaaatcaaacgaattatgacaggaataatccaagaaaattgttatatcatttatcaagataatttagctttaattgttgatccgggcgatgaagctaataaaattgaagcggaaattgctagtttgggagtgaaaccaattgctgttttactgacgcattgtcattatgatcatattggcgctttagaagaaattcgctcgacttatcaaattccggtatatgttagcccattagaacaagaatggctttcaaatccagatttaaacctatctgcgcatatcgcgggaaaagcaattattgcacaacctgctgaatacgaatttacattaggtgactataatatagaaggttttcgttttaaagtggtgccaacaccgggacattctatcggtagcgtaagttttattttcgatgattttgcagtggttggtgacgcgctcttcaaaggaagcattggccgaactgacttatatacaggtgactttgacacgttaatcaatagtattaaaacagagttatttgtactgccagacgatttcgcagcatattcaggacacggagatgcaactacaatcggtcatgaaaagaaaacaaacccatatttcaactaaaaagaacttgcagaagcacctagtctgcagtttttttgtaatttaatagagaggatgttagaacatgcattcagatgaagaaattttcaaagatacaacaactaaagccctactccaattactaaaaaaagatatagactttcatgaatattgctaccaagaaattttcccaagaggcaaagaaatcaaaatgaacgacaacaaaaacttcaagatttacttagttgaaagtggatattttgcctattgtctcaaaaatgaatatggcgactttggcattattagttttgttggtggtgagattgccatcaatttaattccgctaatcaaagaggaaccggaagacgcttttttacggtgtttaacgcaagttcgttgctgggtgcttgatcctgattttgtaggacgagtgttagacgaaaataatcaaaaagctaaatttttattatcgaatttactttatacaagaaaagtttattttaaagcgagcaaacgtacttttatgaaaaaggaacttcgcattagagcttgtctgaaagaaattggtttgtacatgggacgagtaacaaaagataaagattttattttgccagatgaaattaataattctattttggctcaatacgcaaatacgacaagagagtacacgaatattatcgtactcaaactaagaaaagaaggaattttagacgatagccataaaccgtgggtaataaaaaaaatcgatgaactataatttataaaacttaatatttattgattttctgtgcgtaaaaggtggaaaatttaaaaaaacatctaaaaaaacgtgagaaaaactgtcacaaaaagtacttatttggctgtttttcgcctaaaaaatgtttatttttaatgcctaatagtaaaaaaaatcttgttttttgataataatgttattttatttggtttaagccttctctagggtgttttcattctgtgatattatactttagaggaggaatttgcaatgaacacattagaaaaaagacaacatgaaatcttgaccaatccgcttcatttttgtaagaagtctggggattttgctaaacatagtatgagtattaagctttctaaaaacgagctgtttgatgttgattttgtaacagggatctattttgttgaaaaagggattgttatgaaaggaacacaaatagatgattatataggatacgatcaattactgaaacatggtgatgtatgcaatttttcatcttttatgtcctcagatttaaaacgtaatattagcgcaaaattattatcgcctagttctagtgtgattactgcagttgatagagatttttttatttttatggtggaaaaacatgtgagcattgaagaatttatgctttttcaatctaaaaaagaaattatgattctgcaacgtcgctgtttacttaacacactcaaagtaaaagatcgcgtcaagcacgtgattgctgcgattggctatgaatatggcatttcaaacggtgacaatattcaaataccacaagaattatcaactacatttttatctaaatttatgggaatcacaagagaatatcttagtctaactcttagcgaactcaaaaaagaaggatatttattaaatactaaaattcctgtaattatcaatgtagaaaaactattcaatgaaattccatatgaatctttaattttataaataaaagaagatagtctaccggctgtcttcttttttatgctaaaatgaaagaaaaaaggagttccgcaatgagtgaatacttggaaattccagaattaaataaagcatttccgtttcgatcttttgttaatgaaggagaagttcttgtttatcctcattggcataaagaaattgagattatttatgcactaaaaggcagtctaaaccttggagtaaatgatatgcccatccaacttaatgagggtgaaatacaaatcattaacggcggagatgtacattattttttagcttcaccaaatagtgagcgtattgttattcaatttgatttaagcctatttcaagaagaaatgcaaatggacggacaaaatggcacccttcgagaaatgctcacggagatggctcatttaagccgagaatggccagaagaaacgacggcgaaggtacaatcacttattagaaatatccatttagaatcgagtaatgattccccgggcaaacattatattcttaaagccgatctgctagcgattattggtttaatttaccgcgaaataccacagaaaaaaacgcaacctgatagcgtcatttccgaaaaagctgtacttaaatcaaaagaaacactccaaaagctagatcagattttttcatatgtagaaaaacattatcaagaaccagttagcttacaagaagttgcggattatactggatttagtacgtattatttcacgaaatttttcaagcgaaatactggtatgacgtttgtgacttttttaaatgattaccgtttaaataaagcgaaatggatgttgttaaatgaagcgttccctgtaaccgaagtagctgaacttgctggatttagtagcgttaaaacattccaccatgctttcaaaagagcgatgggggtagcgcctcttaaatacaggaagacaatatacgggaataattaagcaataaaataggaagaattaccttcagtagttttgtatgatgtaactatcaaaactattggaggttttttattatgacattaaaagttggaattattggttgtggaggcattgcaaacgggaagcatatgccaagtttattaaaagctgagaaagcagaaatggttgctttttgtgatattgttctagaaaaagcggaagcggcagcaaaagaatttggcagcgaaaatgcaagcgtatacacaaactatgtagaattactccaagataaatccattgatgtcatccatgtttgtacaccaaatatttctcatgcagaaatttctattgcggctatggaagctggaaaacatgttatgtgcgagaaaccaatggcaaaaacaacagcagaagcgaaaagcatgattgaagctgctaatcgtacagggaaaaaactaacaattggttaccaaaatagattccgtaaagactctgattacttgcatcaagtttgcgaaaatggtgaattaggcgatatttattatgcaaaagctaaagcgattcgtcgccgggcagtaccaacttggggcgtattcttggacgaagaagctcaaggtggcggaccacttattgatattggaacacacgcacttgatttaacactttggatgatggacaactataaaccaaaatatgtcgtaggaaatagctaccataaacttgcgaaaaaagaaaatgcagcgaatgcgtggggttcatgggatccaagtaaatttacagtagaagattctgcatttggttttatcactatggaaaatggcgcaacgattgttttagaagcaagctgggcgctaaacacattagatgttggtgaagcgagaacatcactttcgggaacagaaggtggcgctgatatggaagatggattacgaattaacggtgaggcacacagccaaatgtatgaaaagaaaatccaattagaagcaggcggcgttgatttttacgatggaacaggtgatgatccagccttaatcgaagcagaacaatggttagaggcaattttaaatgatactgatccagttgtaaaacctgagcaagctcttgtcgtaacacaaattttagaagctatctatgaatcctcaaaaacaggacaaccagtttattttaattaaggaggaagtgcttttatgaaagcaaaaatagctttgcagttatggagtgttaaggaagcttgtgaagacgatttctttggaactttagaaaaagtggcggaaatgggttatgacggtgtggaatttgctggctattatggtaaatccgcgagtgaaatcaaagcgaaattagccgaacttggactagaagtagcgggatcacatattagtaaagaagagcttcaagccaatttagataacgtcattctttttgaacgggaattaggtaataaatacattatttgtccatatgccgatttcgactcaaaagaaggatggcttgaattcagcatagagctaagtaacataggaaaagcaatccaacaatccggaatggcgtttggctatcataatcacgctcacgaattagaaaaattagatggcgaaatcattttggacaatttacttgagaatgttcctgaaatggttgcagaattagatacttactggatagagtatgctggtgtaggagtcattccttttatcgaaaaatatcgtaatcgagtaccgctaatccatattaaagataaagcgaaaacgaataaagaaagcaccattatcggcgaaggaattctcgatgttccaggatacgtgaaaacagcgcttaatgcaggaacagaatggctagttattgagcaagaagcatttgttgaagatccgttaacaagtgttgcaaaaggttatacgtatttagcgaatgtattggaggagaaataatatgacgcgtgtgacagtgtggaacgaatttttacacgaaaaagaagatgatgctgtgcttgcaatttatccagatggaattcatggacaaattgctagtttcctagaaaaagcaggaattgatacgaaaacagctactttggaagaaccagaacatgggcttacagaagacgttttagcgaatacagatgtcctaatctggtggggacatatggggcacgaccgcgtagaagataaaattgtcgatcgtgtgcaaaaacgtgttttagaaggtatggggcttatcgtacttcattctggacatatgtcaaaaatctttatgcgtttaatgggtacgagttgtgatttaaaatggcgtgaagcaaatgaaagggagcgtctttgggtagttgacccgacgcatccaatcgcaaaaggtattggtgaatttattgaattagatgaagaagaaatgtacggcgagcattttgatataccagcaccagatgaactcattttcttaggatggtttgaaggcggagaagttttccgaagcggtatcacatacaaaagaggcaatgggcggattttctacttccaacctggccatgaatcttatccaacgtatcaccacccggatattcagcaagtaattattaacggcgttcactggtgtgcagaaggtcgaaaaacatatccaaaatatggaaatcatcaaccacttgaaaaaatagggaggaaataaacatgaaattaggcgtatttacaccattatttgcaaatttatcattagatgaaatgttagataaagtaaaagcggcaggacttgatgctgtcgaaatcgggactggtgggaaccctgggaatcatcactgtccaaccgatgaacttttagcgagtgaagcagcgcgcaaggaatatttagaaaaatttactagtcgaggattaacaattagtgcttttagttgccacgataacccgatttctcccaataaagaagaagcggctgcatctgatgaaattttgcgcaaatcaatcaaactagcttctttaatgaatgttccggttgttaatacattttctggaacagcgggagatagtgacgatgccaaagcgccgaactggccggtaattccttggccgactgtttatagcgatattaaaacatggcaatgggaaactaagctaattccttactggaaagaaattggcgaacttgcagcggcttctggtgttaaaattggtatcgaattgcacggtggtttcttatgtcatacaccatataccattttaaaactgcgtgaagaaacaaatgatgcaatcggtgttaacttagatccaagtcatttgtggtggcaaggaattgatccagttggcgctatcaagatcttagggaaagctggagcaatccatcatttccatgccaaagatacgtatttagatcaagataatatcaatatgtacggtttgactgatatgcaaccatatggcgacgttcaaacaagaagttggacattccgttcggttggttgtggtcatagtttgacagaatggtcggatattatgagcgcgcttcgaacatatggttatgattatgtagtcagtatcgaacacgaagatccattaatgtcgattgacgaaggcttcgatcgtgctgttacaaacttacaatcgatcttaattaaagacaaaccactggatatgtggtgggcgtaacaataagaaaggatgtcttagaatgaaaaaatatcaattagtaattgttggttacggcggaatgggaagctatcatgtaacgcttgcatcggctgctgataatttagaagttcatggcgtattcgacattctagcagaaaaacgcgaagccgccgctcaaaaaggcttgaaaatctatgaaagttatgaagctgttttagcagacgaaaaagtagatgctgttcttattgcaacaccaaacgatagccataaagagcttgcaattagcgcacttgaagcagggaaacacgttgtttgtgaaaagccagtaacaatgacaagtgaagatttactagcaattatggacgtggctaaaagagtaaataaacattttatggttcatcaaaatagacgttgggacgaagatttccttattattaaagaaatgttcgaacaaaaaacgattggtgaaatgttccacctagaatcacgtgtccacggagcaaatggtattccaggagattggcgtcatttgaaagcacatggcggcgggatggtacttgattggggcgtacatttacttgaccaattgttattcctagtggatagcaatgtgaagtccgtatctgctaatttaagttttgcgcttggggatgaagtcgatgatggcttcgtaacgttcattacttttgaaaatggtattactgctcaaatcgaagtaggcacaacgaacttcattaaactacctcgctggtatgtcaaaggcacagaaggaaccggaattatccacgattgggatctaagtggggaaatcgtcaaaccaaccgcacttgctaaaacttcagagccaacgccaattaaagcagggcaaggactgacaaaaacaatggcaccaccaagcgaagaagcaaccaatacattatcacttccggcacctgccaaattagctccatctttctataataactttgtcgatgttttaaataatacgagtgaaccaatcgttcaaaacgaagaagtttatcaagttttaaaattgattgaagccatatttgaagcggctgagaccaatcgaaccgttcattctatttaaaaaagatgttttagctttctataatgtggaaaacactactatggagataaagattcttcattagaaaataaattctaattaggaggcaataacaatgagcgaagataaaggtatgaaagacaaagcaaaaggacttaaagacaaagtagtaggtgacgcaaaagacaagttcggtaaagcaacagatgataaaggcaaacaagtagaaggtaaagctcaaaaagctaaaggcgaagtagaagataaaacgggcgacgctaaaaagaaattatccgaataagttaaaaaacaggcttgaaattttcaagcctgtttttttgtcaattaatggcaaaaggttttgtttcaaacgagataggtttatgcggagtcggattcagccttcaataaaaaaacactttgttctagcctaattaataggctaaacaaagtgttttttatttttcagctaggtatttaattttatcagggacgtttttgatttttttatagttaacaaccattttgttttcgccgattaatactttaaactggtcatctttagctaatttcttttcagaatagaatgtaatgtttttttgttttcctttatcatcatagactttggaaacatatttataacctttaaattgattttttgttacagctttaccagtttcttctactttaaggtaataggatttgactgcggcatcggttggcatcgcatactcccaaatagcacagacagctagaagaactgccgctaacaccatcaaaactctttttttagtaaacatttctccctcatccttcctttgctttattacattaagtttacaatgaatacagaataatatcctgtttgttaactaacaatatcctcatgtaaccttacaattttgtcagaatggtgacaaaaccgaatcataagtttgtgaagttataaaaaacagtttttttacctactaaatgtagaaatgaagaaaaaaatagacactataagtagtggctttttaggagaataaatgtgcaagaaaacacatgaattcactcaaaaaatttttttatttgctaaaaaccttgttgtaatcgtcgttttggagatttcacagataaaatcaaagcactatatcttgcattcacaatgaaaaagttatactatatatagtatcgaaagcgaaatattgcttcatcgccttttaacttttattgaggggaatttgctcctttaaaagttaatttttttgctccatggaacgaccataaatagttcagcggacgaatgaaaaagcgcaaaatgaatcagatatttttacaacgaggaaaaaaggatgaaatggggattgcaaatgacaacttacatagtaaaagacgggggaaacagaaagctaccttttgacaaaagccgattggatggatatttagagaaaatccatgaagaatttccaaaacttgatttagaagattacaaacgtaaggtttttaattttgttgagaagaaggaagattatgcggctgacgaattagttgattatctaattagggaagcagaagctcgtacagatattcatattcctgaatgggaacatttcgcggcacgtctttatttaaataaattatataaaaaagcgagtaaaaatcgtttttataatgacgatgataaatatggttcatacgttggacttcaagaaagtttaggcgagcgtggtatttattctggtaatatcctaaaaaattattctaaagaagatttaattgctgcagggaaattaattgaccctgaaaaagataaattatttacttataatggtttgtatttacttgcgacacgttatttggcaactgactccgaacgtaatgtgtatgagttgccacaagaacgctggttaactatcgcactttatttaatgcaaaacgaaccaaaagaaaagcgtatgaagctagttgaagaagcttactgggcgctaagtaatctatatatgacagttgcgacaccgacacttgcaaacgctggaaaagttggcggacaattgtctagttgcttcattgatacagtagatgatagcttacaagggatttacgatagtaatacagacgttgctcgcgtttctaagcacggcggcggtgttggagcatatcttggttatgttcgttcaacaggagctgctatccgcggcgtaaaaggcgcaagtggtggcgttattccttggattaaacaattaaacaataccgcagttagcgtagatcaattaggtcaacgtaaaggagcgattgcagtttatttagatgttttccataaagatattgaatctttccttgatttgcgattgaacaatggtgaccaacgtttgcgcgcacatgatgtgttcactgcggtttgtatccctgatattttcatggaagctgtagaacgtcgcggcgagtggtatttattcgatccacatgaagtaaaagcgaaaaaaggctggtacctacaagatttctacgatgaatcaaaaggcgaaggtactttccgcgaaaaatatgacgaattagtagctgatgaaacaatcagtaaaaaaatcgttaaagcaattgatatcatgaaacgtgtcatgatgagtcaattagaaacagggaatccattcatgttttaccgtgatgaagtaaacagaatgaacccaaataaacatgaaggcatggtgtattctagtaacttgtgtactgaaatcatgcaaaatatgagcccgacaaaaatgattcaagaaattatttctggagatcaaatcgttattacaaaacaagcgggagattttgttgtatgtaacttatcttctgttaacctaggtcgtgcagttgttgctgaagaaggtactttagaacgtttaatcgaagtagaagtacgtatgttagataacgttatcgatttaaacgaactaccagtaccgcaagctactattacaaaccaaaaataccgttctatcggacttggaacatttggttggcatcacctacttgctcttaaaaatatcgcttgggactcagaagaagctgagaaatatgccgatgaattatatgaacaaattaactatttagctattcgcgctagtaacaaattagctcaagaaaaaggtgcttataaagtcttcaaaggcagcgactggaacactggagaatatttcgcacgtcgtaactataactcacctgaatggcaagaattagcgaaagaagtagcagaaaaaggcttgcgtaatgcttaccttgtagctgttgcgccaaatatgagtactgcgcaaattgctggttcaactgcttcgattgatccaatttacagtgcattctattatgaagagaaaaaagactaccgtcgtccagtaattgcaccggacttaaacctaagcacatacccatactacgaaaaaggtgcttacaaagttgaccaattcgcaagtgtacgtcaaaacggtcgtcgtcaacgtcacgtagaccaatcactaagctttaacttctatgtaccaagtggtattaaagcaagtaaactacttgaactacacatgactgcttggaatgaaggactgaaaacaacttactatgtccgctccaacgatattgatgttgaagagtgtgaatggtgctcaagctgataaatctctaaaacattttatcgataacacaataagaaagggagggcttgcctagatggctaaccaaaaagaacaactgacacgtattaaaattttagaacctttatttcctaatcgttctacttcaatcataaacggagaaactagtgggattttaaattggaacgacatcccgtatccatctttctaccgtgcttataaagaactttctactaactactggattccagatgaagtagatatgaaaagcgatgcaaaacaatatcccgctctttcagaacaagaaaaatatgcttttgatgcaatcattggcttgctagcaacccttgattcaccacaaacacgttttatttataacattgcggaatacattaccgatccagcagttcatgcgaatgcagcgattatcgcacaacaagaagttatccataatgaaagttattcgtatgtacttgcttctattacaaatttacaagaacaaaatcgcgtttttgaacttgcgagaacacatccaaccattattaaacgtaacgagccaatcatggctgcatatgatgatttcatgaataataaaacaggtgaaacacttgtaaaagctttaattcaatcgtctattttagaaggaattaatttctacagtggttttgcttacttctacaatcttgttcgtcaaaataaaatgacaggaacagggaaaatcattagctttattaatcgtgatgaactagctcactcgaagttcatttcagaagtaatccgggcaatccttggtgaaaacccagaattacaaacagaagagctagtagaatatacgcatgatgctttccgccacgctgttgaacttgaaacagaatggtctgaagaagtgttacaaggtattgaaggtattgatgtggaagaaatggttgactacgtgaaatatcgtgccaacaaaatgctaggaatgcttggtattccagaactttatccaggacatagtgataacacaatgacatggattaaagcttacgcagataactttacagaaacaaaaaccgactttttcgaaatgcgcaattcaagctataaaaaaacgaatatggataacggattcgacgatttatgagaatcttgttagcctatgattctctaagcggcaatacgaaaatggtggctgacgaaattgaagagattttacaaagcgaaggacatgaagttgtgtcctttcgcgtatctcctctagccgagtatccgcttgatgaggattttgacttgtacgtgttgggggcatggacagtcgactacggaagaacgccgccggatatgaaagattttatcgcggaactagccgttaagcccaagaatgtagccatttttggcactggggaaacacaatggggtatggagttttattgcggagctgttgaccgaatggcaaaatacttcggcacaagctacccaactttaaaaatagagcaaatgccacacacagaacaagatgtggctgatatagacaattgggtcaagaaaattttagcgttaaggagtggaatcaaatgacaagtattgaaattaaatcacctgaagagttccaagctcatattaatggggaagaattagtatatgtagattattggaaagataattgtcctaattgtaaaatgcttgatctttcgtttgctgaattcaaaaactctgaaatcgcaagcaaagtgaaagtattaaaagtaaaattagaagaaatgggcgaaaacttcttttttgatcgtgatgtacaacaaacgccaacacttgtactatacaaaggcggcgaagaaatccaccgtttaaacggatttatcccaccaaacaaaattgaagaagcagtttcattaaacgcataatttaatgagtagcaagtctccttataaataggcggcttggtgctcatttttttataagagtttgaactatttttcacaaataaattcttctaaaggagctaaaacagtgagacaactacaagatgaaattactgcttttctaaaagaacgtgattggctagatcaatacaatcatccaaaagatttagcaatttcgttgtcacttgaagcagcagaattacttgaatgctttcagtggaaaacagatgaaatagcgctaaaagaaaatcgtgaagaacttttaaaagaagtagctgatgtgattatctatgctcttcaaattgcagagagtatgggagcggacggcgaggaacttgttcgaatgaagttagcagaaaatcgtatgagaacttggccgaaaaaatagaaaaaaagctgctttaccaaataatgataaagcagctttttattttaataggaataagaacgtttacggcgttttttggaacgaatcattgtaaaaattcctgctataactaaaataatagaaatgatacatacaccaaaaccgataagtccggtaatgctaaacgaaaagccaaaaccaatcaaaccaatcagaagtaacactaagccagctagtttcatttgaaaactcctttcagaaatcttatctctattatataggaattatctgaaaaaaataagactttaaagataaaaaatttttaaagatgaaatgcattgatagagcaccagttcgcataagttggaaatagtcaagactgcaaaggaaaaaaattatctgttatagtaagaaagtgagagaagcaaggaggaaaacatatggattttaaagagtatcaaattttagcaaatagaactgctgcaacacacgaacaggcactaacaaattacggacttggtattactggagaggccggtgaagttgccgatttgattaagaaatatgcttttcatggacatgatttagataaggagtctctaacaaaagagctaggagatgtactttggtacgtatcgcaaattgctaaatgggcagatataagcatggaaacagtagcagaattaaatatcgagaaactaaagcgtcgttatcctcaaggtttttcaaaagagcgaagtaagctccatatcgattaaaaaaacgtttgtatttaagaaaattaattttcctaaaatacaaacgtttttagttttttagtgagctagaaaacctgctaaatagcgtataaattacatattggataatcgaaaagtaaaatacaaaattccaaaatggccagtgaaaaacacttaacataatttgcaatgaatcaattggctgcgtaagtaaatggatggaatgtaaacgagagaaccgtccaatgtatatcgcataactagataataaaattaacccaatcaaaagtaattgataacttagtaaactagtccaattaaatcgtcttcttatttcagcaagcatttttgcgaaagaccagaatccaataaataatccaaagaacacaccgacgataatataagtgaaatgtcgccataaccaaggtgctgttgaaagtattccttctgccccgtaaatttctaaacgttgtaaatgaagtaaatcagttaaaagatacggtgcatttgggaaaaatactagccaaacaatccctagtggccaaaaaatccaccagacgcgaggtttttttgtgagaaatacagctatttcgaaaggtatataagcaagcccgacatttaaaattagaaaagtgtaagtatctgcagtgaaatgcagcacaagaaagtatccgagtaagaacgctcggcaagtccaaattgctttcgtcatgaaatagtcacctcgtgtttgctattgtatcacaaatcgaggtgacgaggacatcttaacctgctaaatgaaacaaaagtactaaagctagaccaaatgctgaaaggaaaacagaaccgattaacgccgcagcaaaaggttttccacccatttttccgaacgatggcaagtggacatttaaaccgagtccgcccattgacatagcaatgaggaaatatgcacagatgacaagaaaatcggttacagatgttggaataatcccaaagctattaattgcactagttgctaaaaagccgaatataaaccatggtacaggaagttccgcccatgaaaagcgatttttagtcccagcattaaccatttttgcgacaacaaagcagactggaacaagtaaggctacacgtgttaatttaacgataaccgccatatcgacagcagatgagccgcctggatctgcagctgcaataacgtgggcaatttcatgaagtgtagcacctgcaaaaatcccataaccatctggtccaagtggcagaattggataaatcaacgtatagataacggtgaaaatagttccaagtaatgcaataatcgtagcagcgacagccgtttggttgttatcagcttttacttgtggagaaatcgcaactactgcagccgcaccacaaatccccgtaccacaagcgaccaaaatagctagttttttatccactccaaaaagtttagctaagaaataaacaatagtaataccaaagcttaggcataaggcagcaattagaaacactcgccagccagcatgataaatatcaactaagttcaagcgaaaaccaagtaaaataatcccggcacgaagaatgaccttgttggaaaactgaataccagtaaaccatttttccggaactgggaaaagtgcacgaatgataataccaattaaaatagcagttacaagttgtccgagaatcattaaaaatggtaacttcgctaaaaaataagataaggtagcaatacagaaagtaagcgcaataccataccaaaaagtcttcgttttaaataaaatttgactcatattcatccccctttcgtttatacttttactttaccattcttgattttattagtaaaatttatattaattatattattgataagttatttttatggaggtgttacgatggacgaggcattaagaacatatatccgagtagtagaattgcaaagttttacaaaagcagctgaagaattacacatttcgcaacccgcagtatcattgcaattaaagaaattagaagagctttacgaaacagaacttatatacagacaggctaaaaagtttattttaacagcaacaggagaaattttataccaccgtgccaagcaattagaaggactatataaacaagtggaagatgaaataagtttatatcaccatcatttaaaaggtcgacttcgcattggtgctagttttacgataggagagtattatctgccagaagtgattgcgaaatttcatgccctttatccggatattacaatagaacttatcattgaaaataccgcaaaaattgctgacaaagttgaacttcttcaagtggacacagggctgattgaaggccaggttagtaagaaagatttagagataagtgctttttcggatgatgaaatgtgtatcgttggtcgagcagatggttcgcatacagaaatcgagcaaggggcgacttggattgcgcgagaagaaggttcaggaacgcgtgaatatttggatcatgtattaagtaccaatggctggaatgttgctgaaaaagttgttgcctggagtaatatggcagttaaacaaatggttcttgaagggatgggctacacagttatttctaagtgtgttgttcaagcagaaattacagcgggaaaactgcagacatttaatgaggctgggagcttaatgcggaagttttcggtactaaaaaacagacaaagacttgaaaatcgaattgctgaaacctttttaacatttttaaaggaaaatcggtaaataaaactagctttttaattaactagtgattacaatgagaaagaatacattttagaaagggagaagcaatgaaagaatattttatagatcgttcctataaggcttctatggggattgcgaatgcggttcttgtaacgcttggaattggacttcttttgcagacaattgggcagatgacaggactttcatttcttgtaacggttggcgcaattggtaaaacgatgttaattccgggaattggtgttggtattgcgatgtgcttgcacgcaaatacgcttgtgacgataagcgcggcagcctctgctgttattggcggcggggcagtggcggcgttagctggtggtggagttgctattactagcggagaaccagtcggagctattttagctgttattgttgcagtttggactgggaaaagggtgactgggaaaacaaaatttgatatgattttaattcctggtgtttcacttctcgcgggcggactaagcggtattttatttgcaaagattatggcaccgattttggcttctgtaagtcttggaattagctcgttaattggtggctcaccgctgatttcatcaatggctatcgcttttgtgtttggactacttattcttaacccggcttcctctgctgcgctcgcaattgcgcttcaactggatccaacagcaagtgctgcagcgttaattggttgttcggttcaattcgtgtcatttgcggtattaagttaccgagataataactggggtgcattttttgcccaacttatctgtacacccaaattacaaacacccaacatcattagaaaacccagccttatgttagtaccactactaacaacactgattgctggacctcttggcgtgatggtgttccatatccaagccgcaagtgaagtcgctggtctcggattatgtgcctttgttgcaccactttatttaatagcaaattacggattcagcacactggctgcttttattttggtagcagttgtcttgccaggtgttattgcacttattgtcagaccgtttctaattaaaaaggaacgcttgaaaacaggtgatttaacgattgaattgcagtaaattcaggtaaaaagtagggctgtatagtcctactttttatgttgcaaagataactatacatattgtcgttattttttcaacatgtcagctaatttcttctgttacaactatctttcttgtaacagaatgtacacatttttttcggaaaaatcatatctaaatggaattttttcgtgtaaaatataacattgtaagcaatcaaaattaaagaggttcaaattatggaaaaaagtggatttgttgcagatcctatatacgcagaaatcaagaatgagattatgactaacactttggaaaatggcgataaagtggacatagaagacatcatgaaacgatttcaagtcagcaaacgagtagcttttggtgcgctccaatgtttacataaaagtggtattatttgcaaaaactctggagaaaaaggtttttcagtggcaattcatagtgaagctgagcatcgcgaaaaatctcgtttaaagttagctttttttcatctcaattatgcggtacaaaaacttcaagaaaaaaacgcagaagtatgcgcaacgtgtcttcgtaacgagttagtttatattaagctagctgctagggagcaagatataagtgtatttagtaatcacgtgaaaaacttttacggttgtatgattcactatactggaatgccagcacttgaaaaaaatatcgatattcttaaccagacaattttaaatatgaaggataacaatgaaaaattgtgttttgaagcttttatgatagatttagcagactcactagaacagttagtgctctctttagaagcgaaagattttgaaaaatgccacttagtcattcaaaaattctacgataaaaatatctcaatcttattttcctaatcgaaaaaccccgtatggcaaattcgccacacggggtttttcttttcggatgagcttgtcttgccactcatctgatgggccggaccatgtctggatgtttctgaataaacatacaacattcggaaaacggtgaggcattttcaaacaagtaggcgaattctttgtcttgctacttacttctcaagatattctaacttacgaataaatgagcgcccgtaacttgcttaaatagtggccatgaatgatacgatactttattcgcttatttaccaatgtagtgaggataaaaaatattgataaacgagcgacgtaacgaaattccgtcttcctacaactaagttagcgtaaagtccttgacgcggcgtatactcctcgccttcctcctgtaaactaaccatagttgcttgacactaaaatccttcaccagacgttttgccggcatatgacaaagctgagaaaaaaatcagcttgtacaccaagtttttgtcattcgcatcacctttttttgttcgttgtactctatatataaccgttctaaataaatgtaaacgctttatcctaaaaatgattataaagtcatagtcctagctttaaatagggtcttttgtcagaggaaataagccattaaaatatcatctacatacttaccttgaataataaactctttttcaagtcgaccttcttgtttaaaaccatttttttcataaaaacgaattgccttttggttaattgacagcacccgtagtgagatttttataaaacctttttcgcgcgcaacttctttcattttgtccattaaaagttgaccgatgccttcgcgttgataatctgggtgaacagcaatatctatctctactacatgtttattggatggtagtgggataggggatttatagccgagaatgccaattattttctcatctttttcaacgactattttggagccaggtggattctttaataaaaattcagcttcactatcgaaatggacatcaccaggagtcgtcccaggcgtccacactaaatgttctaattcaatcattgaggccgagtcttttcttttagatagtctgatttgcataatttaccaactctctttattttcttttcgcgtaggaaagggaggttttccaagttttccataggccgtcattactgtaaagcagcacatttccttgataaagacgaacagttaggaaaaatgccccaacgacacttgcgactaaaattgctaatgaactaaaaatacctatcgttgaaacagataataagtccatgcgcgctaacatcatcatcggtgaaaaagttggaatatacgagccgataataacaagtaaattatccggagcattagcagctgctatggaaccccagtaaccaataatcgcgagaatcgtcattggataaataaactgagcaactgtttctacatttggcaccatcgaaccaatcattgctgcgagtaaaatgtataacagtaaacctaaaataacaaatactaagtttaaaacaagatagtaagctgggaaaacagcaatttggtctaaaacattttggaccatatccgtatttcgtccagcaataagaacgacagctccgcaaacgacataaaagccaatttgggtaagaagcataaagataatggctgttagtttagcaaataagtgcgttctagcagatacacttgataaaataacttccattattcgtgtacctttctctgtcgcgatttcagaagcaacaatatttgcataactcataacgaaaataaaaataacaagtgttaaaatcaatactgctgcgctcataacgtctttttcatggttagtcaattgattatttgattctaaatcatttgtcacagaaacaggagaagtaattgattgtaattgctcattggtgattttataggcggccgctttttcagcaatctttgttgcggtgaggtcttctgttaaacgggttaaaacatcttggcctgctgtttcttgcgtggtataaactgcactaaccgtgtcatttttttgtgtaatagagacgaatccgtcaattttaccgttttttagagcggactgggcggattttttgtctttaatgtcagtatttactttaaaatggctcttgtctttagcgagcgactgggagaaaaccggatcatcagaaagtacagcaatttttgtcatagttttagtagagtcgaaatagactaccatttttggaataccagcaattagtgcggcaattaaaacaggaaacaaaagtgaaattaaaaatgatttggttttgacacgtcttttgtaaacttgctttgttatcacccaaaatttactcattagattcccccgctttccatttgaaaatttcttcaagcgttggagcttggaggctgaaagtttggatgaagccatcctttgtcacatattcaaaaatcttttctgcatctgtttcgttagcaatttcaagttggagaacgccgtcacgatgctgttggacatttagcacaccaggcaaaatagctagttcttctgccgtatgagtagattcaattaaaatacgtttgcgaccaaaaacagatttcacggattcagtcgtaccttgaagcaccgtacttccttttttcagcattaaaagagaatcacaaagttcttccacattttccatccggtgacttgagaatataatcgctgctccggatgcacgcaggtcgaatacaaactttttcaaaatctctgcattaacaggatccagcccgctgaatggttcatctaaaataactagtttaggttgatgaatgatcgtgcttagaagttgtattttttgttgatttcctttggataatgttttaattaagtccgtttttttaccgacaatttctgcgcgttccaaccagttatcgatttctgcttttattttttgcttcggataaccttttagttcagcaaaaaaaattaattgttcttcaatcgtaacgttaggatataaaccacgttcttctggtaagtagccgatgatatttggatcaattctgcttacttccttaccatcccaagtgatttttcctgaagttgcttctaaaaaatgtaaaattagccggaaagtagttgttttaccagcaccattttgaccaattattccgagtattttccctggttctactcgaaacgataaatcattaactgcgattttttttccaaacttcttcgtaacattatgtagttcaagtgtcacaaaagcacccctttctgagtcttctcaaatttcattatacggttttactagaagattgtcttcttaaaagggaagtttatttctaaagctacgttcacaatctttgccaaaaaattgtctagtgtagtggacataacttgttgtaaccgttttcttttatttgtgtataatagaccgtagagggaggtgatgaaatgcttctaaccaaaacggagcgtgcattaattaacttatttttaacgaaaaatgattttttaacagcgaatcaacttgctctaatgctcgaagtttcctctaaaacaatttaccgtaaaattaaaaatatcaatagcgccactgatgaaaaagagattattatttcggaaaaaggccgcggttacaaactaaattataaagcatatattcaggcgaaattagaaacaaccagtgatattttcggttatacaccatccgagcgtcgtgaaaagattttacttcaagtattgtttaaatcacctaagtacttaaatattgccaaactatatgaaggttattacgttggttataattcgataaaaaatgattttgcgcttttaaatcaatctatcgagaaataccatttagctcttgaaaaaaagcaaaaagaaatccgtgttgttggtacagaagaaaacattcgtatcgcaatcaatgaagtcatcaacaacttagacttatctagttacgacgatttaaagacagaatacagcaatctcaataatgccgatgtacagtttatcgttaggcaaatggaaattattgaaaataagttaatgattagcattccgtatccgtatgatattaatattttttcccatttgtacattctaattaatcgttttcgccaaggagaagtggaagattttgacgaaacaaacgagacttatttagtgacaaatgaaaaattgcatactattgctgtagaagccattgaatcaatcgaacaatacttaaaaatgaaattaccgaaacgcgaaacattcaactttttacaatacttaatttcttctcggtttaatcatgaaattgaattaatatcgagtaatgttttaccaatcgtggaggaaatgactgatttttatatcaatcaagttgcctcgaaaatcgatatgcctattaataaaaagcaattaaaaattgaattacttagtcacatgaagccaatggtgaaccgaatgaatcatcaaattaacataaaaaataacttattaagcgatattaaattagagtacggacaactgtttgacattattaaagaaactgctcgggatgttgcggagacgttcaggttgaataccatatcagatgatgaagtcggttatataacgatctatttcgccaaacacatagaagagtcacctcttgtaaaacgaattattattatgtgttcaagcggtatcggaacgtcagaacttttaaaagtaaaggtccaaaaagcttttccagatgtcgaaatagtagacgttttatcatctactagattcaaaaatagcttgcaagactatcagaatattgactttattctaacaacaatcaacgcagaaagtacaaaagaaatcccttcattacttgtaagcgcgatgtttacagaaaaagataaaatgatggtgaaaaaattgatggaaagtttataggaggcgaatcgatggatattcaagaattagatataagcaaagtaataagtccagcacttgtaaatttagagttacaagcaacgacaaaattagaagtaattgaagaattaacagatttacttgtcgaaacaggtgcagtagtggacaaaaaagcttttatagcggatgtgttgtaccgcgaagaagaaggtaaaacggggctcggggaaggagtagcaattccacacgggaaatcagcaagcgtcataaatacgtccattgctgtcggtagaacaaaaaccccggtagagtgggagtcgcttgatgataaaccagtcaatattattatccttttcgccgtgaaaaattcagatgctacgacaacacacattaagctgcttcaaaaagtagcgattttactcgcagatgatgaggtgataagtcagtttcaaactgtcccaacaaaagaagcttttattaaattgttagcaaaaaaccaagattaggaggagtttgacatgaatattattggaattgctgcttgtacatcaggaattgcgcatacgtatatcgcaaaagaaaaactaacgaaagctggtattgcacttggacatactattcatattgaaacacaaggaacaattgggattgaagacgaactttcagcagaacaagtgaaaaatgcggatgtcgttattatcgcagctgacattaaaattaacggcaaagatcgttttaaagggaagcgtattgttgaaatacccacagacttagcgattaaagcaccaaaacaaattattaacaaaatagacaacgaaataaataactagggagtgaactggcatgatgaaaaaactgcaaatcaaaaaacatgcacttacagcgatttcgtatatgttaccgttagttgttgcctcggggttacttattgccattggaaatttaacaaatgggcaagtgattgaaaactataaagcaccgtattctattcctgatgcactcgtttctctcggggttctaggtatgggtttacttgcgccagttattgcaggggcgatcgcctattcgatagcagataggccaggaattgctcctggattgttaatgggacttatcgccaactcaattggtgcagggttcttgggtggaatgctcggcgggtacttagtaggttattttgtactaatactagtgaaatatttaaaagtaccaaagtgggcacaaggtttaatgccaatgatgattattccgcttattagtagtttagttattggattgctaatgtattttgttgtaggtgtaccaatcgtttgggcaacagaggcgatgacaagcttcttacaaggaatgcaaggaagcatgcgatttgttttcggagcagtgctcggtgctatggcggcatttgatttcggtggaccggtaaataaagtagcttctttattcgcggatggattactgctagagggagttaaagaaccagaagccgtaaaaattctagcttcgatggtaccgccatttggagtaactctatcttgggtaatctcgaaattaattaaaaagagaaaatatacaaaatcagaagaagataatatcaaaatcgcttttccaatgggaatttgtatgattacagaaggcgttattccgattgctgccgttgatccgatacgcgtcattatttcttgtacgcttggggctgcagttggcggaggtcttagtatgacatggggtattggctcaccagtaccatcaggcggaatgttcatcgtcccggcaatgaacgaaccaattttattctgtttggcactattgattggaacttgtgtgaccgcagcaatgctactaatcttaaaacgagaaccaacaaaagaagaagagttaattgcagatcaagctatagaagaggaagaagtcgatttgtctggaattaaaatttcataaggcgaggagatataaaaatgtatgtttcgatgaaagggattttaaagcgtgcaaacgaagggcgttacgctgtcatggcaattaattgttttaatttagaaacagcgcgtgcggtcattgatgccgctcaagaactccgtgcaccaattattattgacttgctccaagatcatttaacaagccacttaggaagccgttttttaacgagacctattataaaaatggcagaagaagcaagtgtagaagtagcgattaacttagatcacgggcaggatgttgccatcgtaaagcaatgtttagaagatggtttttcaagcgtgatgatggatgcttccagttatccttatgaagaaaacgttgcaattacgaaaaaaatggtcgaatttgcagaaacttataacgctagtgttgaagccgaagttggaaatattggcgctgtaacaggggataattatacaaatcaagctatgtatacggatcctaaggtagctatcgattttgctaaccagactggaattgatgcgcttgcaatttcttacgggtcttcgcacggtgattatccagaagggtttacgcccgcttttcagtttgacattgttcgagaaattaaagccgcgactaatatgccacttgttttacacggaggttctggttgtggtgaggaaaacattttggaatccattcggcttggtattaataaaatcaacgttggctcagacttcatgaaagctcaagtcgataaaataaaaactaatttaaaagaaacgccaacgattaattatgtcgacttaattagcgatacgattacagctggcaaagaagttgtgcaatattatattcaattatccggttctactggaaaatcactttaaaaggagaaatgaacacatgttagtaaatatgaagcaattattagaagtagccaaagaaaataaattcgcggtaggagcatttaatgtagccgatagtaattttttacgcgtagtggtagaagaagctgaaaaaaacaatgctccagcgattatcgccgtgcacccaacagaactagattttacaaaagatgattttttccagtatgttttagcacgaattaaaaatagccctgtaccatttgtccttcatttggatcacggtgataatatgagtgatgtgatgcgagctgttcgctgtggttttagttctgtcatgattgatggctcactattaccatttgaagaaaatattcgcgtaacaaaagaagtcgtggatgtttgccaccgattaggcgtttccgtagaaggagagcttggaactattgggaaaactggtaatagtattgaaggtggcgttagtgaaattatttatacgaaaccggaagaagcggaagaatatatttcgcgaacaggtgtcgatacgctcgctgtagctattggaacggctcatgggatttatccaaaagacaaagagcctaaattacgcctcgatattttacaagaaatcaaagacctagttaatataccgctcgtgctccatggtggctcggcaaatcctgacgctgaaattgctgcagcagttaaaattggaattcaaaaagtcaacatttccagtgactataaatatgctttctataaaaaatgtcgcgaaattttaagtacaacggaattatgggatgctaacgcgatttatccagactgtattgatgctgcaaaagcagtggtaaaatataaaatggaactattccactctgttaatcaagtgcaaaagtaccaattagcaggtacagaagcttggcggagtgacgaaatctaaacagaaaaaaactaagagtagctactactcttagtttttttctataatattgcgagtaaagcttctgcatcaatcaattcttgtagcttttggacatcattaatgcgccaaggctttttttgtgattctaaaatccctttttcacgtagattactaagcactttggatgtgtaactttttgaagtgttcgagttgtcagcaaggatttgataggttaaaaatttaggcaactcgactgctttttcagaaacacgtaagccgtaatcaatcatcgtatttaaagaaaaataaatactttcgcgggaacttaatttttcttggacagcgatgatataaagccttcttcgcgtttcagcaagttgatgtagcattatgtaatttctagggtcttctaattccatcatttccttgaaaaattgaaattcgattttccaccaaactacatctgttagcgctattagcatcatgtgtttaggaatatcctcggtatatacagggagatggggaaaggcgcctttttgtaagatataagagaagttatgtttattcgtcccttcaaaaacaagtttcataaagccatcttctattatgtagatatattttcttcttttgtcagatgtaataacggtttctttcgggaggcgttcttggatacaatatttattaaagccaggacttttttttagtaatttaagtatattattaatagaagtaaattgatccaacgtttctttcaaatacatatgacttccccctttttaccttaaattcccttattattctacagtaaacgtaatcacaaatattcttgtaggagcatattttccacagaataaccattataaaagaacaattaggctagctacaaatattcataaaaggttcataattagctggaaaaataggtgaaaactacaatattagtcaaaaatagtattcagttaaatactatttttggcttaaatatcaaagtaataattttgaacaaatttaggcgttatctaacaaggaatataatataaatatcaagaaaaacagagaaaataatttacttagtgaataagttttaaatgtgacgaaaaagtcaaaaatagttgctaaaaggtggaagtttggttttgttgttgggtttcttttaaaagtgtttggtagtatcatcacttgtaagaagccactcatcgcattgtaaaactatttgcttaagacacaaaatagaaatgagatgacaagacatgcaatcgctatttgaagatttatatagtaaaaaagtattagaagaagaatttggttataaacgatttttacaaactttaattgataacaggatcccgtataaaaaaacaaaaatttcaaccaatacaattttattaacagaagatattataaatacaaaggtttactttattgaaaaagggattgtttcattagaaaaggagaaaaatatagtaagctttctaggctccaaccaaattgctgggttaaatgactattttatggcggaagctaatgtctatacagcaaaagtcatcgaaacggttacagcgtatgaattcgataaggaggatatcttttgttcgattattgggatgcaagaggggtggctctatttatatcttaataatcgtaatcatgaaaatgttttaatcgcgaaatgcaacttaatgcgtgggaatggagaaagtcgattaagggagtctttagaacaattagggagtttttttggaacagaaaaagaaggcgtggttcgtattccaaagtgttttacaaggaagttaattgctaattacgccaacctttcagtacgctcggttacacatttgtgtggaaaactgatagaaactggttttttagcagaaaattcgaagtcttttattttgttaaaaaattacgaaggcagctgcagtagaattcgaactaaagcaacatctacgtagtgaaacgaaaaaatcatttagcattgtttaaatgctaaatgatttttttgtataaaaaaacaagaaaagaattcttttcttgttcattaaggatgagccgtgctgggttcgaaccagcgaccctctgattaaaagtcagatgctctaccaactgagctaacggctctaaatatgactgggctagctggattcgaaccagcgcatgacggaatcaaaatccgttgccttaccgcttggctatagcccaataatagaaaatggtggaggggagtggattcgaaccaccgaacccgaaggagcggatttacagtccgccgcgtttagccacttcgctacccctccgctataaaatgccgactgcaggaattgaacccgcaacctactgattacgattcagttgctctaccagattgagctaagtcggcgaagaatcgctctctactggcaaatcgaaatctcttgcataattaattctttaaaacagatactaatacatgatataacatttttagtatttttaccagcttttttttcaaaaaaatgaaatttatttttcaagctgctttttttgattaaaagtgacccgtacgggattcgaacccgtgttaccgccgtgaaagggcggtgtcttaaccgcttgaccaacgggccatttaaataaaagttttttaccgctagaaactattatataaaaaaaggttatcatttgtaaatacccaaattaaattcttttttttctgaaaataaaagcatgaaatacgggttatttatcttattaatgggtatgtatattgaaaggcatatgaaaaaaatatttagctggaataaacgaaaaaggaagctctatgaacgactattcgagtagggaatgattaggtgtataaaataatacaaattagtattacaatctaaaatcagctgtgctataatgtgtctggtcaacttggagttagctaaaaaatcacataaaaaaggtagggaatataatggcatcgccgctaaaaagattattaatcggccgccctctgaaaacatcagaagctggagaccaaaaattggggaaattaaaagctttagccgttctgtcgtcagatgcactttcttctattgcatatggtacggaacagattttgttggtacttgtgactgtgagtgctgcagctatgtggtattcattaccaatcgcactttgtgtccttgttcttttgtttgcactaaatttatcttataaacaaattatttactcttatccgcatggtggtggagcctatattgtttcaagagaaaatttaggaaataacgctggattaattgccggaggatctttactagtagattatatgcttacagttgctgtaagtgtgtcttcaggtacagatgcaattgtctcagcagtgccatcattatatccttttgcagtgccaatagccgtattacttgttgttggtgtaacaatcattaatcttagaggaatcactgaatcagctagtttacttgccattccagtctatttattcgttttttctattatcgctcttatttttacaggtttatttaaagtattaactggtatggatgcaagtcatgaaacagccgcagtaggaactcacgtacaaggtgtaacaatctttctactattaagagcatttgcttccggatcggcttctttgactggtattgaagctatttcaaatgctgtgcctttgtttaaagaaccgcgacctaaaaatgcggctaagacattaaccttaatggccggactactaggtttcttctttgtagggattacggttttagcctttgtttatggaactgtacccgaattgaaagtaacggtgctatcacaaattgctgaaaatgtattcggcagaaactttatgttttatttcattcaagctacaacggcacttatcttagttttagcagctaatacaggattttcagcattcccaatgttagcttttaacttagctaaagataaatttatgccgagaatgtatttagctagaggggatcggttaggctattccaatggaattattactctagcagtgggatctatcttgctaattatattatttaaagggaaaacagagttactaattccgttatattctgtaggggttttcataccattcactctgtcgcaaacaggcatgattgtaaaatggtggaaacagcgtccgaaaggctggaagaagtctttatcagctaacttacttggtgcgtctatttcatttaccgtgcttctagtattattcttaacgagaattgaatcagtatggcctgtatttgtatttatgccgattatgatttatgttttccatcgtactagacatcactatcgtaaagtaggaccacaacttagaattgacgaaacaatggacttgcctgacttcaaaggaaatgccgttatcatctgtgtatcggataccaccaaagttgtagaaggagcattacagtatgctaagtctattggtgatacagtcattgctgttcatatttctattgataaaaagcaggaaaaagaatttgttgagagatggaatagagttcatccggaagtgcgtatggctaatctttattctccgtatcgatcgatttcagatccattaatgaaatttattgatacagcaaaacaaaaagcagatcaagataactactcacttacggtgttaattccacaatttatccctagaaaaggttggcaaaatgtccttcataatcaaacaagtctattaattcgtacaagacttctaatgaaaagagatgtcgttgtttcaacatatccatatcatttaaaagaataacaagagaaaaacggaagagaccttcgggggaagagggggatgctcttccgtttttataatggaacaatataagcatagctggatgaaacggatttgtaaaaagtggaaaataagattttaagagcacaaaaagaaagaaaatgcttttttaccctaagcaaaaaccttcttttgccagcagaaaacgaaaataaattccattttaaaccataaaaagattttttcatgaaaaataaaaaaagttgcccgctataaaagtgggaaactttttttgtatatattataaaaaatacgaagctataaatgaatctatcattaaataaaaagtaatacttatatataaaaatgaataaatattagctgtatgcaaaataagtaaaaggacttaattaatgttacaaagtggtaacaaatttttctttttgatgaattcagattgagtggatttttagtgggtagtaaaagccctacatagagccattctcacttttttgagctaactttgaaattccttccaagccttgaaaaaagccgattttcgcgttataatttcagtagttgataggagtcattaatttagtaaaggagcgcttgggatgcaggaacaggacattaggtattatgtactacctactattatcgtttttatattgggaatcgctgctatgaatacatctggttttccatttattagttttctgacaactacgctcgtggctatcgctattggagttttaatcggcggagcacatcaattatgtcgcgttattattaaagcttatcaacaaacaaaggaacgcagagtttctcaaaaaaagtggcaaacactttaaaatgagtcattacataattataataaaccaagcattttcgcgtttttggggagaatgctttttttgtgggttaattcttatttttttttgtgtaaaagatggtacaataaggaagattatgaatggaggaggttggagatggcgactttagcagatgttgcgaaacgggcaaatgtctccaaaatgacagtttcacgagttattaatcatccagatcaagtctcagatgaactgaaaatgcttgtttatagcgcaatggaagctctagagtatgtaccaaactatgctgctagggcgcttgttcaaaataggacacaagttattaaatttttgattttagaagaaattgatacagttgaaccttattatatgaatttattaacaggaattagtcgagagttagataagtattattattcgcttcaactcgttacacaaagatccaggaatattggagcttatgacgggcttattgtcacgggaatacgtgataaagattatgaattaggacttttagatattgataaaccagttattttttatggtgagaataaacgcggctatgattctatagatgtagataataaaaaaggaacggcgcttgcaacggagcacgtggtagaaattggcttttcgcgcattgtttttttagggattgatttgcttgatgaacaatttatgaaatcacgtttagaaggttacgaagaagtggtgcgaaaacatggacttgagccggaaagttattttattgcaaatagctcgagtgttgccgaagaaaaagcatttgaattattacgttataactcagaaaaaattgcgattgtgtgcgcatcggatcgaatcgcgataggtgttgttcgtgcagcagcagcttttggtcgtcgctttggtgaaaatattgctgtaacaggctttgatggtgttttcttagaccgaatttcttcgccaaaaatcactaccgttcgatcacccgttgttgaaatgggagaagagcttgcaaagatgttacttgctaaaattaatgatcatggaaaacctcaaggaaacctattatttactccagaattactgatacgagcttctacaactggaaaagaagagtaataaaaacgctaggaatctttattcctagcgtcttttttatttgagtaaaactggtagaaatgcaatgaaatcaaaaatgaaatgcacgatgaaagtaacccaaatggagttggtttttttgaataagtagttcaaaatgagtctagctggtgctaatgtaatgatgcattgtaggaaattaaaatcataagaagttaagtgccaggttgcaaaaagcaaggcacataataaggaagcttgccaaaatttccaattccattttttccaagcggcgtagagtaaactaatcgatagcaattcttcgccaagtaacatgaacggaatacttgtaaaaacataagaccatgtaagcacactgttgataccattttcagtagtacttcctgcaaagtaagcccaggcaatgttgaaaatagagctgataataattaatgctggagcaccaataattatccatttgaaactaaaatgtttaaaccaatcgagaaattctgctttaagtatgataaaagcaataattcccatgcatagtgcattgaaaaacgcgcctatgaattctaacactccaatattggaaatgatgtgtggcaaaagaagaaaaagaacaccaataatgattgcgctggaaaataaccaatacccttgtttttttaagcttaaagtattttccattttatcctccttttagaccttaataatgactctcattagtccatgagttattatagctctttactttaaatcagtaaagttactaatttgtcactttaaaggaggagagagaattggctttcttctataatatgttacagtgccgaaaaatcttgttaccgttaacgagcgagaaaaggttgcaaacgctttaatggaaatgctaatttgaaatagaacgataggtgatataggaggagaaaaaatggaaaaagcagggatttatcatcaaccagcgagtagctatgcttatagttatgacgctaaaacactacatattagaattagaacgaaacgcttagatattagcaaagttactttaattgctgccgacccttacttatggaaaaacgaaaaatggcaaagtgaatcatattcgatgcgcaaaattgcagagaccgaagagcatgattattggtttttcgcgataacaccagaacatagacgccttcaatacggctttttactaacagatacagaaggagaaacaacattttacggcggacgtggtttttttgagccgactgaagcgaatttagctacgatggattattactttaaatttccgtttatccatgcagtagatacatttgaagcgcctgaatgggttggaaataccatttggtaccagattttcccagaacgttttgcaaatggtaacccggctatttcccctgaaaatgccttgccgtggggaagtaaagatccgaatacaacagactttttcggtggagatcttgaaggaatcattcagcacttagattatttagcagagcttggcatcaatggggtatatttaacgcctgtttttgaagcaccgaccaaccataaatacgacacaattgattataaaaagattgatccgcattttggtgataaagaaacctttagaaaattagttcaagaagcgcataaacgcggtattcgtattatgcttgatgcagtgtttaatcatattggggacacttctctagagtggcaagatgttgtcgagaaagaagaaaaatccgcatatcgcgactggttccatatccatagtttccctgttcgtcaaaatgaaaatggcaatattgaaggagaaccaacactttcttacgatacatttgctttcacgacgcatatgccaaaattaaatacggctaacccagaagttcagaagtatctattggatattgcaacttactggattcgcgaatttgacattgatggttggcgcttagacgttgctaatgaagttgatcatgctttctggaaagagttcaaaaaagcggtccaagcggaaaaagaagatatttatattcttggtgaaatttggcatgattcgtggatttggttgcttggagatgaattccacgccgtaatgaactatccatttacacaaacgattattgagaactttattgaagaaaaaatcactccagagcaaatggtttctggtattaatgaacaatatatgcgctatcctaatcaagtgaatgaagtaatgttcaatatgcttgatagccatgatacagcgcgcattttaacacgtgctaataatgatgaggataaggtgaaacaagcacttgccttcatgttcgcacacactggttcgccgtgtatttattacggaactgaaatcggtatggacggcggaaatgacccaggttgtcgtaaatgtatggaatgggacgaaacaaaacaaaatcaagatatgctagcatttacgaaacaattaattgcgctaagaaaagataaccaagcaattattacatccggcgaattaaattggctaggtgcaagtagcgaaacgggcattacagcattttctaaagaattaaatggtgaaaaactgcatttccttttcaaccaagcaaaagaagataaggatttcacaatttcatttgagaatacagcgacagatatttggaataaccgagctgtaacagaaaatcttgtcgtcccagcaaaaggatttcttgttattaaagaaaacagctaaatcaatggcgtaaaggaatttttcacatgtttaccgaaaaaatgttgttatcggtaacatgtgaaatctccttgtaaacgctttcggaatcagcatataataaatgcataggttaacctaattcacaaactttaaaaaaagaattgaaaaaagatggggacttagaaatcagacattaaagagcggcttttttcataaagaggaggaaaagtaaatgaagcgtttcaaaaaagtgggaatagtttcggcggttttagtaatggctttaagcttagcagcatgtggtggtggaaaagacactagtaaatctggctcatctgatgaaaaaacattaaccgtttccgttgacgcaggctacaaagactacgtgaacaaaataaaaggtgattttgaaaaagacaatgacgtgaaagtaaaagtagtcgaaaaagacatgttcgaaacattagaagctcttccacttgatggccctgctggaactgctccagacgtaatgatgtccgcatttgatagaattggaagcttaggccaacaaggacatttagctgaagtaaaacttggtaataaagacgattacgatgaaaaagaccaaaaacaagtaacaattgacgataaaatttacggcgctccagcaattattgaaactctagtactttactacaataaagatttactcgacaaagctccagcaacatttaaagatttagaaacactttcaaaagattctcgttttgccttcacttctgaaaaaggaaaaaatactggtttcttagcaaaatggactgatttctacttctcatacggactacttgcaggatacggcggttatgtattcggcgatgaaggtacaaatccaaaagacatcggtttaaacaataaaggttctgttgaaggaattacttacgcaacaaaatggttccaagatgtatggccaaaaggtatgcaagacaataagagtgcagatgactttatccaagatcaatttgttaaaggtaaagcagcagcaattctaggcggcccttggtcagcagcaaactacaaagaagcaaaaattaattacggcgtagcaaaaatcccaacactaaacaatggtaaagagtattctccatttgcaggtggtaaaggttgggttgtaagtaactattctaaaaacaaagatgtagctcaaaaatggttggattatgtgactaaccaaaaaaatcaagaaactttatatgatatgacaaatgaagtaccagctaacttaaaagcacgtgatacagcgaaatcgaaaaatgacgaattaactaatgccgttatcgaacaatacaaaaatgcgcaaccaatgccaaatattccagaaatgtcggaagtttggacaggtgctgaaaacttaatgtttgatgcagcttctggttcgaaaactccgcaacaatcagctgacgatgcagtaaaagtaattgaagataacgtaacgcaaaaatatactaaataataatgatttggcggggcaaagatagcgcgctccgccatttttttcaacttagctagtgaatctatatctagaattgagggtaacaaaatgaaactagaacaaaaacaaattaaaaatgttcgtcaagcgactttgttatcaatcattccgggacttggtcaattttataataagcaaaattttaaagggattgtctttttcgcactatttgctttgtttatcatagaattttttgcagttgggctgaatgcactgattggccttgtaacacttggatctgtaccaggtgtagaccattccttatttttaatgattgaaggtactttacaattaattgtgacattactatttataggcttttggtttataaatattttcgatgcaagacgcgtggctatgcagtggaacctaggtgaaactgttaaccgttccgctcttgctattataaaaaatatgctcgacaaaggtttcccgtacttacttacattacctgcatacttagtcatgacttttgttattattttcccagttcttgttactcttttcatggcatttaccaactacgatttttaccatattccgccagcgaacttaattgactgggttggatttaagaacttctttaatattttcttcctaagttcgtatcgcgacacgttcctaagtgtattttcttggacacttgtttggacgatttgtgcgacttccttgcaaattgttgtcggggtgttcacagcgattgttgcgaaccaaagctttattaaagggaaacgtcttttcggagtagttttcttacttccttgggcggtaccagcttttattacaattatgagtttttccaatatgtttaacgacagtattggtgcaatcaactcacaagtcattccgttactgaatcatcttccatttgttgatatcaatgcgattgcttggaaaacagatcctttctggacaaaagtggcgctaataagcattcaagggtggcttggtttcccgtatatttatgtcatggtaacaggtgttcttcaagcgattccaggcgaactttacgaagcagctagaatcgatggagcgagcgcaatacaacgtttccgtaaaattacgttaccgatgattttatttgtaacagctccggtatttattacacaatatacgtttaactttaataacttttcgattatttacttattcaatgaaggtggtcccggaagtgtcggagcaggcgctggatcgaccgatattttaatttcatggatttataaactaacaactggtacttcgccgcaatacgctgtagccgctgctgtgacgttacttatctcaattatcgttatcacggtttcgatgattgcctttaagaaaacgaatgcctttgggaacgaggagatgatgtaaatgagagactttatgaaagatcagcggacaacaaagtttttaacacagtttttcacgtatttatttttaaccgtgctaacgattattattttgtatccgattctaatcacagcatcttctgccttcaaaccagggaatatcgcggcatttacgcttgagtggtcggatagctggacgctgaataactttactagactatttaatgaaacattgtatcttgattggtataaaaatacactgattatcgcggttgtaacaatgattatgcaagtaacgattgtgacgcttgctggttatacatatagccgttaccgttttaaaggacgtaaaaatagtttggtgtttttcttgattatccaaatggtgccaacaatggcggctttaacagctttctacgtgttagcaatgctacttggcgcacttgatcaatattggttcttaacattaatttacatcggcggtggtatcccgatgaacacttggctgatgaagggatatttcgatacagtaccacgggatttagatgaatccgccaagcttgatggtgcaggacatttccggattttcgctcaaatcatcttaccacttgtaagaccgatgattgcggttcaagctttatgggcatttatgggaccattcggagatttcttacttgctaaattcctactaagaactccagaaaacttaacgatagctgttggacttcaaacatttatcgctaacccgcaacaacaaaaagtagcattattcgcagcaggagcaatcttagcggcgctaccaatttgtttactgttcttcttcttacaaaagaattttgtttctggcttaactgctggtggaacaaaaggataattgatttttaaaaaggctgtgataccaatgaaaaaagttccgtttatcattcaatatgtaaaaagtacacttggaccaaatgcgatttttgaaggtcggaaagtactgaaattctggcaaatggttatcgtgtttattttcttaaatgcgctcctattactacctgtatcagcacattttgctaatcagtcgagttttgatttaccaagtttaatgcccgaaatggcgactcttggtacagatcaattcgcgacggaacttagtggtctttcgctcgaaaacggagaattaactgacaaaaatgcgcatatcgtcgaaaaatcggctaatggcgtggctggtgtaaatttaacgaaggcagaacttgccggagctaaaaatatcattaatttcaaagaccgagaaatgacgcttacagatgcaagtggctacacatttgaagtgagctatccaaaagatgccacattaagtgagatcacttctggtgaatcgctagtagactgggtttcggcgcagtggtacttagagaatcaagcatttgttttcttatcaatggtgctgatgattggctcaattattttcgttagctcgctgatgttagctattttcacgacacttttcatttggatgacaaaacggagcagtttttctcgtattgcttcctttaaagaatcatttaatttaacgctaaatgcactgggaattccagtgattgcggcttgtattatcggttttatctactttgatattacgattattatggctgttcagtcgctcggaatggtgttaatgatagcatggacatttttaaagacaagattttataagactagtgaaaaaagtatggctgctagtcgctaattacgaggttttagtatggcacagaagcaattatttgaaatcgaaccatggacattacggacaaccaaactagataaagaaaataaacgtttgcaagaaagcctaacttcactcggtaatggatacatggggatgcgcgggaattttgaagaaagatactccggcgatggccatattggaacttattatgcaggcgtgtggtttccagataaaacaagagttggttggtggaaaaatggctatccagattattttggaaaagtcataaatggacttaattttatcgggattgaagtacgccttgacggtgaaaaactcgatttatttgtagatgaagtaagcgattttgaacttgtgctagatatggaaaaaggcgtgttaagacgccagttcacagtagttaaaaataataagacgtttcgaatttcagcggaacgatttctaagtgtagctacgaaagaacttgcagtaattcgctatcatgtagaagctttaaatgcggcaaaagtagaattaacgtcctttttagatggtaatgtgcaaaatgaagatgccaactacgaagaaatgttttggcaagaagttgcagaatcttcctcagaaagtcgcggctcacttgtaactaaaacaattccaaataactttggtacaccgcgcttcaccgtttctgcagtaatggaaaataagactaatacggcaaatgaaacaaaccaaacaaaaacactttatgcggaaaatcgctatcaatttgatttaaaagaaaatgaagtagcgcaaattgaaaaacgagtagtaatcacaacttcccgtgattttgaggaaagtgaacttcttcaagccggagaggaaatcttaaaaaatatagcaacaaaatcatatgaagaccttttagaagcgcatatcgcaggatggcgcgaacgatgggataaagcagatgtggaaatagcaggagatgattccgctcaacaaggcattcgctttaacattttccaattatttgcgacgtactacggggaagatgctagattaaatattggtcctaaaggtttcaccggagaaaaatacggcggggcgacttactgggatacagaagcatttgctctaccaatgtatttatcactaacagataagtctgttagccataacttacttaaatatcgccataatcaattagatggtgccaaaatcaatgcggagaaaatcggcttaggtggcgcactttatccgatggtaacttttacaggagtagagtgccacaatgaatgggaaattacctttgaagagattcaccgaaatggcgcgattgcctacgcgatttataactatacgaactacactggtgatgactcttatttaaaaacagatggtatcgaagtgttaactgaaattactcgtttttgggctgatcgagtgcatttatcggatcgcttagataaatatatgattcacggtgttactggaccaaatgaatacgataataatgttagcaataactggtataccaactatattgcagcttggactattcgatatacgctagagaatttagatgtagaagcgaaaaaacgtttaggtgtgaccgagtacgaaatcgccaaatgggaagacatcgagcaccgcatgtactatccttttgatgaaaaatggcagatttttgtgcaacacgatacatttttagacaaagagttacgttccactgatacgttaaaaccagaggatatgccaattaatcaaaactggtcttgggataaaattttacggtcttgcttcattaaacaagcagatgtacttcaaggtttatatttattctatgatgactttgattttgatacgaaacaacgcaactttgaattttatgaaccactaactgtacatgaatcaagtttgtcaccagctgttcatgcggttttagctgcggaacttggtaaatatgataaagctgtagaactttataagcgcacagcaagacttgacctagataatattaacaatgatacagaagatggcctccacattacatcaatggcaggaagctggttatccattgtacaaggttttgccggaatgcgagtaacatcaggtgagttaagttttgcgccatttttacctaatggatgggacaactaccgtttcaaaattaacttccgcgaccgcttattagaagtgaaagtagaagtaggacaagtaactgttaaattatgtcacggagaaccaattcatttagaaatgtataagaaaaaatatttgctggaaacggctgtaacagtagaaatataaccaaaaataaacttgtcaaaaacaatgaaaactgtttttggcaagttttttctttaacaaatctttccaatttttagcgggatgattgctttttccgcctgcactcttatgctataataaagaaagtgaaccatgtgatcataaatggttttcaagaggcacggaggtgaagtgatggatttttccaatatgtcgatattgcattatctagcaaatattgtagatattcttgtcgtatggtttgtaatttataaagtgatcatgttaatccgaggtacgaaagcagtacaattattaaaaggtatttttattatcattgcagttaaattattaagcggattttttggtctccaaacagtagaatggattacggatcagatgcttacttggggattccttgcaattataattatcttccaaccggaattacgccgtgctttagagacacttggtcgaggcaatatttttactcgttacggttctagaatcgagcgagagcaacaccatctgattgaatctattgaaaaatctacccaatatatggcgaaacgtcgtattggtgcgctaatttcagtagcacgcgataccggaatggatgattatatcgaaaccggaattccactcaatgcaaaaatttcttctcaattattaattaatatttttattccaaatacgccgcttcatgatggtgcggtaattatcaaaggaaatgagattgcatcagcagcaagttatttaccactttctgacagtccatttttatccaaagaacttgggacgcgtcaccgggctgctctagggattagtgaagtgacagacagtattacaattgttgtctccgaagaaacaggcggaatttcccttactaaaggcggagaacttttccgtgatgtttcagaagaagagttacataaaattcttctaaaagagcttgtcacagtaacgcaaaagaaaccttctatcttttctaaatggaaaggaggcaaaagcgaatgatggatcgaattttaaataataaatggtcgattcggattatagccttgttactcgcagccatcctttttacgtcagttaatgcaaataataataacgccaccactttttcaacgacttcttcaagtgattctgaggtcattgagaatgttcctgtcaaagtatattatgataaaacgaatttatacatttcaggcattccagaaacagtcactgttacgctttcagggccaagaagtatcgttcaatctgctaaagcacaacaagatttcaccgtatacgcagatttgaaaaatgcatcgattggaacgcaggaagttaaactccaagtaaaagacgtatctgaccgacttaaagttaaagtcaatccagctactgttaacgtaaatgttcaagaaaaagtaacgaagaaattctctgtagatgtagagttaagtaaatctgttattgcagatggttatcaagcaggaacgccgattatcgatcctaaaaaagtttccattacaggtgcaaaagacacgatcgaacaaatcgcttatgtcaaagcgaccctcgaaagtgatggaaaacataaatcggaatttaccgacaaggcgacagtatccgtttttgatagtaacctgaataagctggatgtagaggtcagtccgcaagaggttgaagtgaccgtgccggttgagaaagtcgggaaatcagtaccggttaaaatcaagcaagaaggaacaccagaaagcgatatagagatttcaagcatgacacctgataaatcagaagtggttgtcgtaggtgacgatgcggtccttgacaagattaaagaaattgaaatcccgattgatgttacaaaaataaaagcagatacggtcaaagaaattactgtaccagtcccaacaggcgctaaatcagtacaacctacgaccattgaggttaaaataaaaaccgtaaaaaagtctgaagcaaataatggagcgaccacatcaaataataatcaaaacacagaagcaaataataacgatgcgacggatgattctgaaacgaatgattccaaaacatcaaaatctttttctaatatgcaagtatatatgagtggtctgaaaaatactttcgatgcccagatgttaacgccagcaaatggcaaagtttctgtaaccatcaccggggagaaaaaagtattagatgacataaccgcaaaagatttaagcgttattgctaaccttagtaaaagtaaagctggcagttacagcattccactagaactaaacggtttacccgataacgtggcttatgtcatcaatcctaaaaaagctgattttattattaccgaaaaagaagcacaaaatacagtgccttccaaaaacacataaacctgaggagtgtggggccagcgtgtctcatactcctgcttttttacaaaagcttcatatacatagaatagtttgaaaagttactaatgccaacgttttattatagagagatgaaattttttcttaaaaaaggtataataacaaatgtatggttgagacttaacaaaaaatagaaccagcatttgaaaaaaagtaaaactaaaacgacaaacaaaaatcatttagataatgaatgacttagaaggagagtaataaaatgggtaaatattttggtacggatggagttagaggggttgcaaactcagaattaacaccagaacttgcattcagattaggtcgaatgggtgggtatgttttaactcgtcacgttggtgaacacccgcgcgttcttgttgctcgtgatacacgtatatctggagaaatgcttgaatccgctttaattgcaggacttgtatctgtaggaattgaagttatgcgtttaggcgtcatttcaactcctggtgtcgcttatttaacaaaagcgcaaggagcttctgccagcgttatgatttctgcaagccataatccagtagatgataatggaattaagttcttcggttcagacggctttaaactgtcagacgatcaagaagaagaaattgaacaattacttgatacagcagaggatacactacctcgtccaagcggtgaaggtctaggaacagttagcgattactttgaaggtaaacaaaaatatattcaatacttaaaacaaacaatcgagaatgacttcaatggttatcatattgcattagactgtgcaaatggagcaacttctggcttagcaacacatttatttgctgacttagatgccgatattagctcaatgggtgcttctccaaacggtttaaatattaatgacggtgttggctctacacatccagaagccttagctgcatttgtattagataaaaaagcagatgttggtttagcatttgatggtgacggagaccgcgtgattgcaattgatgaaatcggtcaaattgtcgatggcgataaaattatgtttatttgcgcgaaatacttacgtgaacaaggtctattaaatagtaatacaatcgtttccactgttatgagtaacttaggcttctataaaggcttaagagaacttgaaattgaagatgttcaaacagctgttggtgaccgttatgttgtagaagcaatgcgagaaggtaattataaccttggcggagaacaatctggtcatattattttcctagatcataatacaactggtgatggcctgctttccggaattcaattaattaacgttatgaaagcaactgggaaaaaattatctgaacttgcttcagaaatgaaaacattcccacaaaaactggaaaatatccgtgtaagtgataaaaatcatgtaacagataatccaaaggtaagtaaagtaattagtgaagttgaagctgaaatggctggtaatggtcgcgtgcttgttcgtccatctggtacagaaccattagtaagagtcatggtggaagctgcgacaaaagaagcaacagacgaatattgtgaacgtatttcagcggttgttcgttcagaaatggcacttaacgattaaaactacaaataaaaaatcctgatgatataaacttcatcaggattttatttctttcgaaagaatgatttggtctacgcaaagaataccgttttcgacaatggtttgccctttataatgttctataaaataatttggaacaatttgttgcatccgaaagccgtttttttgataaaaagcaagttggtcaatacttgaattacctgttttaacaatgatttcagtgaagttgttttgtaaagcaaaatcaaacgctttttcaagaagtattttaccaattccttgatttctctgggtaggtagaacagcaatattcataatttcaagttgcttattatttaatggaagcaagcaaacgacgccgattgttttatcggtatcatttagttggaaaacgcgtgatttatcaaggtatttcgcaatttggtcttcactcggatcagcttctagtaatagttctagtggggcaggttgtgttttatcccaaatggtccagttcatttttatcacctcggttttagagtaacatgggaaaacttaaataggaagggaagtgggcaaattgcctgaaaaattaagaggaatatgtggtagtttgctaattgcgctaggtgtgactcaactttacagctttgtaagcgccatggttggatattttagtgcagagaaagatagctttacatttgtttggaattattggatgttacttatttttggtttagcattatttattgttggttttggtctcattaaaagagagaagcttcgattagtaagtattattttaatcagttgttttgctttatttcaagcgttttcggtgtattattaccaactaagaatttttgcgaaattggaatatgcgcagccgtttgagtggtcaggaacgttactagttatcagtagtattttagtgttaatcgcgttattaattggcccgaaattctctttaaaagagataagcgaagatcattcttggaaaaataaatggcgttacgcagctggctttttcgcgattattggtgctgttacggcaatttttgcagctgtaacgatttttaaacaactacattcggacagtattaaagaaggctatttatttacaacttcacttgatgcttactttgcttgttttgtagccgtgattttcttggttgtagcagtactggcatggcgtaaagtctcgctgttattaattggaattcttatgggagcagctttcattttacttacgaattatttatctgtaacaaactggattgattttgcaaaagaaaatttgtcaattacgtttggtagtaatgaaagacaagtatttggaatgcaatttttaatgggagcatccgcttttctctctagtatctttgcttatatcgcaaaaaagtcctctaaataattagaggactttttttattattttttaccgaaaacaatgttcgtatagctatttagagtgacaaagtaatacacaatgtacattaatgtgtagacaccggtagaaatcacaactgggagtgttaaatctagtgccagcatatgtgaaagtccgataagggcaaaactactgtgcgcaattccgataactaatggaatcaagaagactacgagtaattgtttagcaagaattttgcggatgtcttttttagtaagaccaattttcttcaagatgtcaaatgtaccgatgtcgttatatgcttctgtaagctgtttgaagtagataatacttcctgtcgctgctaggaaaacaaaaccgataaacataccgataaatagaagtacaccggttactgtgatgatttgttgataagtagctgcgtaagaaatgagattgctatcttttggaactagtgactgcatttttttatctaaatcttgcgcttgttttgcatcttttacagtaatagattcaactgtttgagatgggatattcttatcagtccctatcatggcaactctttcatcaggaagaacgagtaagcccataacggaagcaattggtgaattttgaacaacggatttaatttcaacatttggtttgcttggtgaagctaatgtatatttttcgccaatcatttgtttttgcgctttttcatcataagtgactgaaagtaccatttgtgcttcattagcttttaaattagctgcattttctgggttgccttgttttttaacaagtgaattatattcagattgagaaataacagggaaaccttcatttatatcatattctacaaagtctggtcgagttccttctgccttgacagtgtagtaagtgctcttttgttcgtactcaactgggtgatcagagtcactttcagctgttttcacgattttatcatttagtgctttgtctgatggaacttgatactcaaaacttgatggtgcagaagtgtttgctgatgtatttgcttgatagtatatactgcttatcgttccaatagcagacaaggtcgttgcacttaaaatagagataataattaatgtttttgcattggatgaaattctaaagttcaactgagaggtagaaatgatattactacctttataaaaaatccgtttgttgtttcttagctttgtaagtaaatatggtaagaaaaaggtaataaacaaagacgtaccaataattactgaagctaaaatgacaagcgctccgatagaaaaacctaattgtgcccataatgaatttttagaatcaagcggttgcccagcgatgaagtaaccaagtgcgattaatacgatggaaagtagcgccaaaataaaagaaggttttgggcttttttcgcgttttgattcggagtggaataagtctagcaatgttgtacgatagataattcggtagcctgtgaaagaagtaaacaaagtaatgataataaaaacaatacttgtttgtaaaacagctccccatgaaaaggcaaaaccgccaatgctatcgagattaattaagttaagtaagatcgttacgaaaatttttgaaagcagtgtaccagccaaaataccaattactaatgcgccaagacccataatgaaattttcataaaataacatccgaccaatttcttttttacgaaggccgagtaaagaataaagaccgatttcttttttccgttttcttgtgaagaagttgttggaataaagaatgaaaattgctacgaatataagcaaaatgacagaggagctagaaaacgcggttgataacttagaagattggtcaattctagctacgactgatggatccttcgaaagaacaaggaaggtaaaataaatcataatactgaaaatcatcgatgcgaaatataaaaagtaatgtacgaaattatgtctaatatttttcttcgctaaatcaaataacgtcatctgtgtcgccccccagttttgcaaggacgtctagaattttttggaagaactccttacgcgtttttgttccacgatagatttctgtatataattctccgtctttaataaataaaattcgtttgcagaaacttgctgcaaatgcatcgtgtgtaaccatcataatagtagctttatcttgttcattcaagtcacgtaagctttcaagtaagttggttgcagatttggaatcaagtgctccagttggctcatccgcaaaaatcaaacttggtgaagtaataattgcgcgagaggcagctgtacgttgtttttgaccaccagagatttcacttgggtatttatcaagaatttctgtaataccgaatttttcactaatatttgctaatttctcttccatttctttgaccgggcgttttgctagtgcaagtggaaggataatattttcacggattgtgagtgtatctagtaagttgtaatcttggaaaataaaacctagtttatcgcggcggaaagtagacatttgttgttcattcatgttttcaagttcttgtccggaaatcataatctcaccagaagttggcttatcaatagtagataaaacgttaagtaaagtagacttacctgccccagaaggacccataatacctgtaaattcgccttctttaatatcaatactgatattttcaagtgcagtatacacatttcctttgcttccataaatttttcttacattttttgcttgtagaactgtctccattattttctctccttaaaactagattcatttagtatatgtatcattctatcgtttaaaaaggagtggttccatcgtatcaaatgacaattacggaagatatccttacaaaattgttagttttgtgaaataaaaaactggaattcgtttcaataaatctttgaaaaaagacttattaaagggaattccagcttgtatttgcttaaattgtaaataatttggagagattttcggagggtagaaggtttccgatgaagaaggaaccaaactcagcataacgcgcacttgcttcatcaaaacgcatttctgtcacgattcgtttgaattctagtgcatcgtctgaaaataaggtcacaccccattcgtagtcatcaaaaccgatggagccaccgataatctgttgtacttttccagcatagcttctgccaataagaccgtgatcgcggataagtttttggcgttcttccattggaagcatataccaattatcggcgccgtcacgttttttactcataggatagaagcaaatgtgttttttaggcggaagagctgggtaaagtctcgcacgaacgcctttattttggtaaggatcttcgccgccagccatatgagatgctagatagttacttaattccacaacagatatgtaggaatacgttggtaataagtagtcggcaatggctaatttattaaaacggttttcgacttcatttaatgcctctaaggaatcgcgtaaagtgaagaatactaaatccgctttttgaccaagaatgctgtaaatggtatgttcaccttcaccgatattttttgtaatttccatatcgcttaaaaagtggcttagctcatttaacataagttcttgatttcctggatttaattcacgccacgctgcccagtcaatcgaacgaaaatcatgtagacaaaaccatccatctaaagtttttactgcttcattcattatgtatcactccttgtttagaatatcactaactagagtgtaacatatcagaagtggttcgtccgtttcgctgtttgtgaaattaggtttcaaaagggcggtattttttgcgtaaactttgctggctttctaaccgaagttcaatatctattcggtgaaaaagaaccatatttcctttttttgtaaacgggagtacatcgcgttttgctaaggaaaggagagcttgcttagatatgcctaagtaagtcgcggcttcatttgtagtcaggaagttttcttctagccatttaaaatctatttgttgttggcgcacatcttttcacctctttttctttaagtgtagaaaatatctgatagaaatacaagagaaaacattaacaattgctgaaaaacaagctatactttaactaaatgataaatctaggaggtacaaatatgaatgacgtattaactttactcagaaatcatcgttcttttcggaaatataaacagggtatcgaaattccggaagaaaaactcgatgctattattcgagcagctcaagcagccccgtcgtggattaatggacagcattattccattattgcgattaaagatcaagatcgtaaaaacaaaatggcagaactttgcgggaatcaaccatacatagctgaatgttcggtatttctttgttttgtagcagatttccaccgcgtaaaagtagcaagtgagctgcacggcaaaagtttccaaattgctagtgaagaagatttgttgatggttgcagcaacggatataggtttgtgtatgcaaaatgctttaacagccgctgagtcgcttgattatgggacaatttgtattggtggtttacggagaaatattacagctacttctgagtttcttgctttaccaaaatatgtcatgccggtcgttgggctttgtatcggggttccggatgtagaagctcctgtaaaacctcgcttgccgaaagaagccgtttattttgaagaaacgtaccaaactgatgttatgcctttacttgaagcttatgaccaagaaatcattcctttttctgagcgggaaggttttgtgtcttataccgaacgtttagcaaaattttatgataagccgtattatccgaatttaacagaacaaataaaagaaagaggctttttaggcggaaaataactagcatcttagcggttattagtatatacttttaagtgacaaaacccagcaaaatcgctggaatggaggtaagtgtataatgaaagaagcattatttttaaaccctgtttttcaagatcgaatttggggtggaacgaaattacatgattactttggttacgatattccgtccaacacgaccggagaagactgggcgatttccgctcatccaaatggtccttctgtcatcaaaaacggggaatataaagggaaaactttagctgaattatggcaagaaaaaccagaactttttggtaatccgaaagaagctgtttttccattacttacaaaaatcttggatgcaaatacggatctttctgtacaagttcatccaaatgacgaatatgccaaagtacatgaaaacggtgaacttggtaaaacggaatgctggtatattattgactgtgctccgggtgcggaattaatttatggacataaagcagcaagcaaagaagaattcgctagctgggcaaaaaatggcgaatgggataaattgcttcgtaaagtagcgattaaaccgggtgaattttattatgttccaagtggtacgattcatgcactaggtactggcactttagtacttgaaacgcaacaaagctctgacacaacttaccgtgtatatgactacgaccgtaaagacgcagaaggaaacttgcgcgaacttcatttagataaagcaattgacgttacaactgcgccacatgtggatgcgaagttagatattaaaacagaaacgcgcgatggtttaaccgaaactacttttgtatcgaatgacttctttagcgtttataagtgggaagtggatggcacggctgaatttgtggccaaagcgccttatacgttagtgagtattttagacggagaagcggtacttacgattgatggcaacgaacaggctattaaaaaaggagatcatttcgttttaccaaatgaagtgaaatcttggaaaataactggtaaaatcacagcgattgtttctacacctcctgtaaaataacaaataagcagaaatctttgtataaaaactatacaagatttctgctttttttatttctatggaattgcgggctacttttttgagttacttaagatgaatgtattaatataggtatctatttcgagtttatgtttctctacatcaacagtcttaggcgtgagttcataatactttgcgttttctatattacgtgcataaaataaactgtattccatcgggtgaatcacatcatagttatttgcaagtatcagtgtgggcatcgtcacattagttaattcatttttgctttttattggcctatctctaggtatatcaataaattttttattgtaattaacagaggcgtcgtcttcaaaatatcgcttaaaagtatcaattgctttagggtaggtatcttttatcgatggaaatagcgggtcttgctcaaataactgtgaaccattttttttaggtaaatatatacttacggtattaaaccattctatcacttgttttttcatgggctcatctgtcgcagagctcctaagtaatataagccccatcactttatttgctgcatggactgccaaattcaccgcaacaccagcccccatagataatccgccgacataaaaacgctgtatgcctaaacaatccattaacgctagtgcatcactcgccaagctatcgtagctaagttttctggaatcatgtccacttttcccatgacctctttgatccaatgaaattaattggattttttcatcattgttaaatgtgtcaaaagcaaattttaaattatcacctagtccatgaagaaacagaaaagggataccttctccttgtatttcatagttaaagtaagttccttcgtgtttaaataatggcatcgtttataaaccactcctttgatggtattaatccagcgcgtttagtatttttcaccattaatccatgtagttagaacctcgaatttttcatcgagtaaaactaagtcagcgatatagcctttttcaatgcgaccgaattttttcataccgaggatttctgcgggtgtacttgtggccatttgtatcgagtcttgtaagctaataccaaattcattacttaaccttaacgatttattcattgtcacggtgcttgaagctagcgttccgtcttgtaagcgtgcgattccttccttaacagttacttggtgaccgccaaaaatatactcgccatcgccaactcccatagcttgaagggcatcggtcgtgagaacaatcttatctggtcctttaattttatggatgagacgcacaatcccaggatgaagatggaccccgtctacgatagtttgaacgcttaccgcatcattttccaaagccgctgtaacaagtccgggtgcccggtgatggattgctggcatagcattgaagcaatgagttatatgtgttgctcctttttcaaaagcatcttgcgcctcttcataagttgcattggaatgcgcaattgcaataacaactcctctttttttcaagaagtcaatgagttcgataccaccgggcaattctggcgcaatcgttaccattttaatcagaccatctgcttcatcaaaaatctgtttcatttcttttaagtcagggtgtcttaaataagctggattttgcatgccctttttttctatattgaggtaggggccttctaagtgaattcctgcaattttagcaccttgctcttttccaaccactttttttgtttgcttaatcatttgaatcaaatcttccaaagaagaactaaccgatgtgactaaaaaactagtacatcctgtttccgcacaagccatagatacagcttggatgctttctgttgaaccatccatcatatcgtaattctttgcaccgtggatatgaacgtcaatcattccgggtatgagcaactgaccatttccatcaaaaatttgctctgttgaatatttttcgggaataattttattacttggaaaaacttctgctatcagattgccttctgtaataactgttgcattgattaactcgctttctttgtaaacttttacgtttttgataatcgccattattttcacaatcctttcaaagatataacttctacttctttagaaataaggtgttgcatcaaatcttttggcaggggctcatttgttatgacggcatcaattccagagaaatcaagcttgaatgcagtctttgtattcactttcgtatgatcaattaacaggtatactttttcggaatttctgataatctcttgcttcatgtagacgtctgtaagttcggaataaaagataccttgttccgttagcccagcaccaccaataaaagcaacgtcaaagttaaattgtttgagttggcctaaaacaggctcgccggataatacacgtgaatggaagttgaaaaaaccgccaagcaagtatactttattagcttcattctgagctgctgcgattgcattatccatagaattagtcacaaccaataaatcattttgctcaaggtcggaagccaaaaaatgaactgtggttgaaacatctaaatagatagtcatatgatcttttattacttcgccagcagctgaggcaatagcttgtttctgttcactctgcttcactaatctacttgtataactttctatttgaggttttaaaattggtagtgaaaccccacctggatagcgttctgcgagtccgctttcgactaattttaaaatatcacgccttgccgtatcttttgaaatggaaaaaatccgcatgagttcttcttgagaaatagttttcttgctctctagtagcttcagggctttcactattctttctttttggttcattattttcgccgccttatttaatttattttaagtttattcttattattaataagtttttataagttaattatatacctaattatgtttatgtcaaattacaattttttgcttaaaggagaagctagttctagcagttttttcttcgtgtgttttgagatctaggttataatggtagtaattgtgtaaaagaatcgaaaacagcagcatagaggtggaaagatggctataaagatgaaatgggttattttagtaagtattattatcgtgcttttagtggtgggctggtttctagggactaggctaacggtgaaaaaatatgaggtgagttctactaaaattgaaaaagagattaaactagtgcaattatcggatttgcattttagtgaatttggcgataaaaatgaaaaattgctagataaagtggctcgtttaaatccagatgtgattgcgattactggggatctttttgataaacaaggggatagtgttcctaaagaacttattaaaaagcttacgaagattgcgcccgtgtattattcacctggaaaccacgaatacgatgttaaaaatgcctatgaggacgattacaagccttttttagaaaaaatgggtgtagttaacttagaagacaaaacagctactatcgatgtgggcgggcagaaatttcagatgtctggtttgcggagtagtgcgaatttagattatgattatccttattataaagaaggtatagcggagataaaaacgcagcaagattcgcagtactatcaaattcttttgtcacatatgccggattattttgagctttatgtggaaaatggctttgatttaaccttaagtggtcatacgcatggcgggattgtgcggattccttatacaaatattggcgcgattgctcctggaccacagcgaacactgttgccggagtatgtatacggtgagcattcaaaagatgggaagacgatgataatttctgctggacttggcgcggggagtcttcatcaaaaagcttttccgcggttagggaatccatatgaaattgttgcggttacgataaaaccggagacgaaataaaaaaagagccttcatcaaggctcttttttgctatttaaatatatgatccaaattcgtatgttcgtctgactcgcaattacaagctttttcgagttcgcagccgccgcattttccttctttgctacgttttacaaattttataatcgcgtaaatagtatatccaaaaattgctccgccaagtaataaattaacgataatactcacgaaaatcatcctctcttaaacgaatagactgccgatttgataaacaagaaatactaacacgtaagctgtaacaagtggataagcgacagagaatgcggtccatttccacgaactagtttcttttcgaatcgccgcaaccgttgctaaacacggaatataaagcaagatgaacaacataaagcaataagccgaaagtggcgtatagaaggtgctaacgatgctgccaagcgaactttctccaactgcataaataatcgccattgtagaaacgactacttcttttgctagaaaaccaggaataagggtggctcccgcttgccatgtaccaaagcctaaaggaacgagtagcggagcgagcatgccgccgatgattgctaagaaactttcgcccattggaacatcaagtccggatggaccggcgtaatttagcaaccaaatgataaccgaacctgcaaaaatgaatgttcccgctttacgcaagaatccttttcctttttcccacgtgctgcgccataaagttttgagcgatggtaggcggtagggcggtagttcgacgacgaatacggaattatcttttttaagtattgtttttgaaaggattttagtgacaatgagtgccattaaaataccgataacgtaaagtgaaagtactacgagcgcctgatgtttctcgaaaaacacgcctacaaaaagagcataaacaggaagacgggctgaacaagacataaatggcgaaacaagaatcgtgagtgtccgctctttggattcttcaattgacctggcagccataattccgggtacgttacaaccaaaaccaataatcattggtataaaagctttcccatttaagccgaaaatttccattactcggtccatcacaactgctattctggccatatatccagaatcctctaagacggaaataaagaagaaaataactaagatttgaggaacgaagacaagaaccccaccaacgccagcgatgatgccatccgcgaccaaatcaatgataaacccagacgcaccaatagttgttaagaaagatgtcacccagtccgtgagcgacccgccgataaaaccatcaagcatgtctgagagcggggcgccaacccaagtaaaggttatttggaaaatcaaccacataattcctaagaaaatcggaattcctaataatttatgtgtaaaaattttatcgagtttgtctgatagtggaatatccgaattacgggtgtattcgactgaggtcaaacaaatatcatgaatataactcgcgcgcacttggtggaaatggttttctagtttgccgttgagttcactttctaactcagcacggatttgttgcaactgttcgaacgccgaattagatgttaaaaatgcttccgttacttcatttttggaaagaaattgaattgctaaccagcgcgattgtttagcaggaatcagttcttttgttaaagcctgaatttctttgattgctttctcagctggttcgccgtattgtaaaacaagcggaatcgctggtgccacgtgcttttcagataaagtagataaaatatcctcggttccttttccggagcgcgcaactactggcaaaatcggaatacgtagtttttttgctaagttttggatgtttaaatgaatgccgcgtccagcagctacatctatcatattaagacccatcacaacaggtgcgccgtactcaagcagttgaacagttaaatttaaattgcgttcaatttgtgaggaatcgacaatgtttaacatgcaatcgaatttttcttcaagtaaaaatctagtgacaactgtttcatcacgagagataggatttaagtcataaataccgggtaaatcaattaattttcctgttttagaacgtaaagtaccgactttcttttcaacggttactccgctccagtttcctacatattcataagagcccgttagtgcattaaataaagaagttttaccagtgttcggatttccgagtatgcaatatgtattttggctcatctgcgttccaccataatggcacaagcatcacattgtctaatgcttatatattgtccttttgtttcaaaagtgcatggaccaccaaatagtcctttttgtttgatacaaatatcacaaccttcatcgcaaccaagcgcaagtaagcggcgtttaagcatcgcattctcgatttttaactctgagatgcgaactttttcgccgacagcagtttcatttaactgcataagctcgtagacctccttttatgttatgtagtgaacatgataatcattatcaactatgttcattttatcacgaatgcaatttaatatgaagtattttcttgaatttgttcggaaagtagcaaaatagtagggtataacagcaaaaaagtttcctaatgggacagtgctcttctaactgaatagcatgcctttttacctctgtattgatacacggaaataagtgctggagctgtttttaatcgctttttttctatcaagttggtagtttttatagtaaaatggtaactataacatttatataaatggaggaaaatagtacatgagtgaattatttactactatcaaaggacaagttactgggaaaaacgtgcgcattgtattgccagaaggaactgacgaacgtatagtcggagcagctgcacgtctgcaaaaggaaaatatcgtaacaccaattttacttggaaacaaagctgaaattgaagcaaaagcaaaagaaattggcgtttctgttgaagggattactattcatgatcctgcgactgatccactttttgatgaattagtggctgcatttgtagagcgtcgtaaagggaaagcaacggaagaagctgctcgtaaaatgctcgttgatccaaactattttggaacaatgcttgtatatactggaaaagcagaaggtcttgtaagtggcgcggctcactctactggtgacactgttcgtccagcactacaaattattaaaacaaaaccaggcgtaagtaaagttgccggcgcaatgattatggttcgcggtgaggaacgttacttattcagtgatgtagctatcaatattgcaccagttgcagcagacttagcagaaaatgcgattgtaagtgcagaaacagcggaaatcttcggcattgatccacgtgttgcaatgctaagcttctctacaaaaggttctgcaaaatccgatgaaacagaaaaagtcgtagaagcaacagctcttgcaaaagaaaaagcacctgaattaacgcttgatggtgaattccaatttgacgcggcatttgttccaactgttgcggagaaaaaagcgccaggatccgttattaaaggggatgcaaatgtatttatcttcccaagtctagaggcaggaaacattggttacaaaattgcgcaacgtttaggtaattttgaagcagttggaccaattctacaaggcttaaatgcaccagttaatgatttatctcgtggttgtaatacagatgacgtttataacttaacgttaattacagcagcgcaagcagtgaataaataatatgcaaaagcagtagactaaattgtctactgctttttttataccattttttcgaggaagtacttcatcaagcgattgtcgttagttagttcaggatggaatgcggtgactaaaatgttggcttgtttagcagctacgattcggttttcaacggttgcgagcacggacacttcatcactcggttcaattaagtaaggcgcgcgaataaatacggcttcaaaaggcgaatcatcaaatacttcgacagttaattcagcttcaaaactttctttctgacggccaaaaccattacgaattgctgtagcctcaagtaatccaaggctttcttcgccaccttcaatttcttttgacaaaagcacaagtcccgcacaagtcccaaagatagctttaccttccttggcaaatgctttaacaggttccattaaatcataacgtttcataatcttgcgcatcgttgtactttcgccacctggtaaaacaagtccatcaagcccagctaaatcatttgaatgctttactttaaaagcaagagcaccggctgattcaatcatttgaatatgttcatcaactgcaccttgaagcgcaaggacaccaatttttttcatattaaaaactccgatcttgcattctgtcttctggattaagacgagacatttcgattcctttcatcggggaacctagctctttggacagttttccgattaattcatagtctgtatagtaggtagtagcttgaacaatcgcactggcaaatttggcagggttatcggatttgaaaatacctgatccaacgaaaacaccgtctgctccaagttccatcattaaagctgcatcagctggagtcgcaacaccaccagcggcaaagttaacgaccggaagtttacctagcgttttaatttcttttacaagttcatatggagcaccgaaatttttagcggcaaccattaattcatcatctgtcatgcttgcaatttggcggatttggccatttacttggcgcatatgacggactgcttcgacgatatttcctgttccgggttccccttttgtacggagcatggcagcaccttcaccaatacggcggagcgcttcacctatatcacggcaaccacatacgaaaggaactgtgaagtctgatttaagtaaatggaattcatcatcggctggtgttaatacttcgctttcatcaatatagtcgacgcccattgcttcgaggacacgtgcttctgtaatatgaccaattcgagcttttgccataacagggatagaaacagcattcattacttcttccacaatacgaggatcagccatacgagcgacgccaccagctgcacgaatatcagaaggaacacgttcaagtgccataaccgctactgcaccagcttcttcagcgatttttgcctgttcagcatttacaacatccataatgacgccgcctttttgcatttgcgccattccacgttttacacggtctgtaccaacttttttctccatactaataacctccatcaaagttaattgaaaatacctgattattatgataagctaaaagccatttcgtaaaaacagccaattggatgttgttttctccatccaattttaaaaggggtgtagtagatgtggaaacttactggaaattctaatttaccgatttatttacaaattgttgatttaatagaaacaaaaattatgaacggcgaacttttaccagaagagaaattgcctccggaaaggcagttggcagaactttttggtgtgaatcgctcgacagtcgttcgggcacttgatgagcttactgcacgggctgttatcgtccggaagcaaggtagcggaacaatagtgaatgcggaaaagtgggggctttttgcggggcagtcaacgaattggcgccactatttaacgcaaggtggttttacaccagctgttccttatattaggcaaacaggtgtaatggaacgcgctgatttggaacaagtgattgatgcttcgacaggggagcttccacttgaaatgactcctaagatggaaacgccaagtctttcgtggcagtcgtttattgctgaagaacaactggaagacgaagctggctacagaccgctacgtgaaactgttcaaaagcaaatgcaggatgcctatggtttaaatgcacgcccggaacaaatttttattacatcgggagcgcagcaagcgttatttttaattacacaatgtttattaaaaccgggtgatgccgtggcgattgagtcgccgtcttacttttattcgctatcgttatttcaatctgcgggcttgcggatttttgccttgccaatggatgatgatggtgtgattatttctgaattacgcgatttatatcataagcatcgagttaaaatggtttttgttaatccaacttttcaaaatccaactggacttgtaatgagtttaaaacggcgcaaggaactcgtgaaagtttgcgctcatttgcaaattccgattgtagaggatgatccgttttcagaactggcagcacttgatagtgaaatccccgttcctttaaaacaactagattcagataatgttttatatattggctcgctctctaaaataatggggtcaactacacggattgggtggctaattggaccggcggcagtgattgaacgactagctctcgcaagacaagagatggattttggactaagtattttcccgcaagtattagctaatagcgttttaaatacggctggatatagagaacatttaaagcaattacatcaagttttagaagtgcgtagagattatttgatcgcggcgctagaggaaattttaccgaacgaactagaattcatcaggccaaaagggggctttcatttatgggtgaaattaccggtagaatttcgctccattcgtgagtttgatatttttttagcgaacgatttactagtgatgcccggggttttattcggggtaaaaggggcggttattcgcgtaacatatgcccgacttgagcaggacgattcaagacaagtagcataaacaataaagcaaatattaatagaaaaaagtgcgatgaagcttgattgaaggctgattcgcactttttcatattccccttgaaaaccttctaatctataatagaaagtaaccctaaaatatcattcatcacaataaatctttctgccaaaagagaagttgtgatgaatcatcatttttatgtaagggttatcatttactattaatataagggagggaaagtagatggaacaggattgtaaggaattaattacttatctgctcttgaatcggcaagtgaatcttagaaatgtttccaagaattttaaagtatccaaagaagcaattggcgcacagattacacaaataaaccatctactaaagtcagaaccaattttaattgaccatgacatgatttttgttacagatgtatgtagggaagcttgttaccggcttttaactgcggaagaacaacagctattttcgttttatgaggtgaatattcgtcgcaaactcatcatgattaaattactgcttcataatcattacatgtcactcggcgcacttgcagattatgtttatgtaagtaaaaacacgatgttaaccgatgtaaaaagtattaaagaaagcttgcatgagtttgaaattcaacttgattattcacgaaaagatggttatgcggtttcgggttcggaatttctgattcgtaatttactggcagaacttattcgcgaagtcgttcaaaccccatacggaaaattcgtgctggatgaaaaaaaactcattaccgtaagcgaagtctttttactaaagaaacggctggaaaaagtcgaaagtaagctccaaattacattcaccgatgagcaaatggaagaattgccctatattctccacggcatcatcaagcgggccaaagtaacgaataggaaatggacttttaaaattgaaatgtatgacatcaaaaatacccgagagttcccgataatgaaagaaatgttttggggttatgactttttaagtgaaaatgatttgctttacctatcgctacaagtacttgcttcgaacttagtcgagtcggcacttcatttctcagacagtgaagaaatcgcctatgcagttgatgagttcatcggcttacttgaaatgtattttgcaactgaaatcatgaagaaaaatgagtttaaagaaaaagtgattttacatgttagaccagcaatttaccggacgattttaggttttcaaatcaataatccacttaaaaaacaatttattaaagaatatactccaacatttaacattgtagaaaaagcctcgaaaccatttgaaaagctcgttggtcataagtggtcagaggaggaaatcgtgtatctttctatgattgttcttggatggatgtatcaaattgaagaaacagagcagccaattttccgcgccgtcgttctgtgcaaaagcggtacatccatctccaaactactcttagaaaacttgaaaatgatgttcccaaatattgattttcaaggagcttatgcggttcggcaattaaattcagtggcacgtgatattgattttgtttttacaactgtgcccgttcaaagcagcgcgaccatttttgttattccgtcgattttaagtaaagatagtcggcaaatcctcagagaacaagttgataaagctattgaaatggacagccataaaaaaaccaaagaactgctcgctatgttaaaagatgatattcctgaagaaaatatccatttagttcaagaaaaagtagaatcattttttagtaaaaaagagcaacctgctgagaaaaaagagccagaaaagatgcagattaccccagaacaaattcattttttagaaacgccactcaagtgggaagaacttgtttttgcagcattttcaccaatgttagaacgagggacagtggcggcaagctatattaagacttgtgaagaaatattctatcaaaactatgagcagatgatgatcggaccgaatatttatttgcctcacgccaagccggtaaatggtgtaataaagcaggatattcagttgatgataatgaaagcggacacaagaacgccggcaaatgaaacagttaaaattatgatcgcactagcaccgtccgaacaaaataaacatataccattattactaaaattgaacgaaattttcttacaaccagagaaattagcggaacttctcgcttctactaacaaaaagaaaatcgttgaaatccttgaaagggggtgagcgtcacgtggattaccatgatttgtttcaaaaagagttaaccctgataaattcaagctacgagagtcaggcagaactttttgaatgtactagcaatattttagaaaaagagcagtatgtagaggcgacttttagagaagcagtaacaaaccgagaagttatttttcctactggacttgagatgaatggtatcaaaatcgcaattcctcataccgatacgatttatgtaaaacggccttttgtactcgtaaacaagctttctacaccaattccttttattcaaatgggaacaagtgagaaatggattgatgtggaagtaattttcatgttaggaattaaaaatcccaaagatcaagttccactgctttcaagtatcatggaaaaatttatggaagcagactttgtggaacaaataaaggaaataaatgatagcagcgcattatgtgattttctaaaaaaacaatttggagagtgattacagtgaaaaaagttatcgtagcgtgtggatcaggagtggcaacaagtcaaacagttgcctctaaagtagaacgtattttaaaagaaaaaggagttcgcgcaacagtagaagcagtagacattaaatcattagaccaacatattaaaacgagtgatgtatatgtggcgattactaaagcgaataaggaatttgatattccaacattaaatggtattgcgttcttaactggcatgggcatggacgaagaaacagaaaaattacttaacgccttaaaataaacaagacaaaacagggagcgtgaaaaaatggagtcattacaatcagttatacagtttattttgaatcttggagctgccgtttttgttccagcactgatgattattattgggcttattgtacgaatgaaagtaagagatgcggtaagtgcggggattatcctcggggttgctttccttgggatgaatatcgttattggctttatgattgaagctttaacgcctgcagcacaaggtcttgcagaacgaacaggaattaatttaagcattttagatggtggatggacctcaatggcgacactagcttgggcatggccatttgccttcctaatgttcccactacaactggggattaatgctattatgcttgtcatcaacaaaacaaaaaccttgaacgtcgatttatggaatgtttggggtaaaattttgacagctgtacttattattggtgtaacgcaaaatgtttatttggcttttatcgttgccggaattcaaattgttactgaacttattctatgtgatgccaaccaacgtcaaatccaagaattaaacggcattccgggtgtaacagtttcccacggtatgatgattttctgtattttcttaatgccaattgattggctactgaagaaaatcccagcactacgtaaagacatggatgccaacgcgttaaaagataaaattggtatttttgcagaaaaccatgtaatgggctttattatcggtggacttttagggattgcagcaggatatgatgtagcaaaaacgttgatgttagccatgcaagcagcagcggcattaacacttttcccaatggttgcgaaactatttatgcaagctttatcaccattatctgatggtatttctgaatttatgaaacgtaaatttaaaaatcgtgaactttttattgggctagattggccaattttggcagggtgtagtgaagtatgggtggcaatcgttcttatggtaccagttacacttatcttcgcgcttattctaccaggaaatggcgtattaccgttcgctgggattctaaatatttccttgtgtgcgccggctctgattgttacaggtgggaacttgattcgtatgattattcttggaacgattacaacacctatcttcttgtatgtatctacatttttcgcaggaacaatcacggatttagcgcattctacaggcgcgatttccctaaaagctggacaacaaattacttggagtacgcttgaatatccagtgttccgttatatttttgcagaagcaagtcagttcactattttaggatttatttttgtcgcaatttgggtattattactagtattttacgtgaaaatgatgaaaaaacgaacaattgaactagaaaaagctagctcttaagaaataggagtgatgagatgatttacacgataacattaaatccagctattgaccggttgcttttcattcgtggggagttagaaaaaaggaagacaaatcgagtcataaaaacagaatttgattgcgggggaaaggggcttcatgtttcaggagtgttatccaaattcggtattaaaaatgaagcacttggaattgcgggatcagacaatctcgacaaactatatgccattctaaaagaaaaacatatcaaccatgatttccttgtagaagctggaacttcgacaagagaatgcttcgtcgtcttaagtgatgacacgaatggcagcacgatgatacctgaagctggttttaccgtaagtcagaccaacaaagacaatcttttaaaacaaatcgctaaaaaagttaaaaaagaggatatggtggtgattgctggatctccgcctcctcattatacattatctgattttaaagaactactaagaactgtcaaagcaacaggggcttttctcggatgtgataactcgggtgaatatttaaatttagcggtcgaaatgggcgtcgatttcattaaaccaaatgaagatgaagtaatcgccattttagacgaaaaaacgaattcactcgaagaaaatatccgcactttagccgaaaagatcccttacctggtcgtttcacttggagcaaaagggtccatttgcgcacataatggcaaattgtatcaagttattccaccgaaagtgcaggaacgaaatgatactggggctggcgacgtgtttgtcggggcatttattgcaggacttgcgatgaacatgccaattactgaaacattaaaagttgcgacaggttgttcagccagtaaagtcatgcaacaagacagttcgagctttgatttagaagccgctggaaaactcaagaatcaagtaagtattatacaattggaggagagataatatgttataccaaaaagaacgtgaagatttagccaaaatagtgaagacgatgtttgaccgctttgaaacaaatgctgcgggagggaatgtgagtgtgcgcatgaataatgagcatattattatgacaccaacgctgatgagccaagcaaaactttgcgatctttccccatatgaaattcttgtagtagataacaataatgaagtcgtagaaggagacggaagaattactcgagaaatcaacttgcaccgtgcctgctatgtagaaaatccaaaaattggctgtgttcttcatgctcatccaaaagaatcgatgttatttgcaacacttggcatggaacttccgaatttaacagaagcaacgcaaaaaatcggtcgaattccaacacttgaatttgcaccagcgactagtccagaacttgctgaaatcgtacgtaaacatgtcatcgaacttggtgaaaaagctgttcctagtgcgagtttattaaataaacacggcattgttgttttagaaacatccctgcataaagcatatgatatgttggaacggattgaatataatgcttatattgcagaaaaagcgatggtctttgatgctttaggtattaaaaaattagctcatgaccgcgaattaaattataatttggaggagtaactaatggaaaaattcctttttaatgcaaccttatttgccagtgctttattactaatggtcggtatttttagaagttctattccaattactgccatatcacttgttttagcagtagtgtcgcaacatttctttcggaaaaaatatcctaaaaaaacacgtagctatcgtgaaataatcgcggcaaagcagaaaaaaggatgaaaaaagggatgaaaatctaaaactagattttcatccctttttattatagtttggaacgttgtgattttttcggtcggacatacaggccgagtttttcttgttcttttgttaaagaaacaaacagcgaaactatcattaagataatcactatcgaaaatggaaaagcggcaataattgatgcgttttgtagcgctgttagaccgcctgcataaagaagtacactcgctattccagactgtaaaagcccccatgttacttttaccgagtttggtgggtttaaagagccaccagtcgtttgcatacctaaaacaaaggtcgcagaatcggcagaagtaatgaagaacacggcaattaaaatcatcgcaacaatagataatacgatgccaaatggaaattgatcaaataccccaaaaaggacttgttcggtcgctaaagtggaaagggccgtatctttgtattgatcgacaaaaatcgctgaaccaccaaacactgcaaaccagaaaatgctaactaacgcaggaagcacgataacacctaataaaaattgacgaatcgtccgaccgcgcgaaattctggcaataaagataccgacaaatggagaccacgatagccaccatgcccagtaaaaaatggtccatgaatcaatccattttctagcatcaggcgcatttggtgcagtttggaaactcatttggataatgttctgtaaataatcaccaaacgaattagtgaagttattcataataaaaagcgtaggtcctagaattaacgttagaataagtaatacgccagcgacataaatattcacattacttaataactgaattcctttatctaagccagacattgctgataataaaaataaaacagtgacaatgacaatgatgattagttgcactgtaaagttgttagggacatgaaataaatatgtaagaccgccattgatttgctgagctccaagtccaagcgtggttgctactccgataaccgtagcgaaaacagcgataatatcgattaattgtccaagtggtcctttcgcatgtttacctaatatcggataaagtgtggcgcttattagaccaggagtatcctttcgaaacttaaagtaagctagcgccaaggcaactattgcataaatggaccaagcggaaattccccaatgaaaaaaagaataacgaagcgcatctttcatcgcagcttgagagccaacttcaccaccaggggcttgaacggcaaaatgggatagcggttcagcagctccccagaaaacaagtccaattcccataccggcactaaacaacattgcgaaccatgacttattactatatcctggtttctcgccaggtttcccgagtcgaatagagccaatcgggcttaatattaaaaatatgcaaaaaatgataatgattgcgactacaaaaaggtagtaccaaccgaaattacttgttaaaaatctttggacatttgttgtaagagtttcaaattgttctggcaaaaaagcaccaaacaaaactgctatgagaactaatagactagctccccaaaagacgttcgttaattttttcattgcatcacttccctttatagtctaagtatgtatttccccatgttagcacaaaggtaacatctattttatagtaacaaaaaaagtactgctctgacaaatcaaaccacaaagtcagctggaattaaaaagctggaacgcatcatgcattccagccaactttataatgtttttttcgcattggcgagtgcaacgtggatttgatcaaaccccgtaccgccatatgaatttctcttttgaaccgctgtttttgaagcaagaacagtataaatgtcttcctcaataagcggatggatttcttggtagtggctaaatgcgacgtcttgcaaataaatcccattttgcgtacattcaagcaccaatttcccaacaatctcatgcgcttctctaaatggaacgccttttttcgcgagataatccgctagttcggtcgcattggaaaaatctttttgcgtcgattcttccattatatctgcattgaccttcatcgtttcaatcattcctgcgaatatatctaagcttgtatgaaccgtctcaagcgtatcaaacatgccttctttatcttcttgtaaatctttattataagcgagcggcagcccctttaaaactgttaacatgccgaaaaggtttccgtaaacacgacccgttttcccacgaattaattcggccatatcaggatttttcttttgtggcataatcgaacttcctgttgaaaaagcgtccgttaattccacaaattgaaattcatggctcgtccaaagtatcaattcttcacaaaaacgcgataaatgcatcattaaaatagaactgttactaagaaactcgataataaaatcacgatcgctcacgccgtctaagctattttcataaacagcggaaaaaccaagaagttcagcgctataggcccgatcaattggaaaagtcgttccagcgagcgccgcagacccaagtggcgaaatatcaatccgtttgacgctttcttctaaacgctctaaatcacgtgtaaacataccaaaataagctaataaatgatgcgcaaaagagatgggttgggcgtgttgcaagtgtgtatagccaggcataatcgtttcgacgttcgcctccgctttttggacaagcaccgcgcgcaaatgttttaacgattgaataatttctgcgactgcttcttttaaatacaaatgcatgtctgttgcaacttggtcattccgactacgcgccgtatgaagttttcccgcgacaggcccgatttcctcgtgtaacagtttttcgatatttaaatgaatatcttcgtttacagtactaaattccagttccccaagcgctaatttttcttggaggatttttagcccagctgtaatttcactcgcctcagaatcagaaataataccacattttgctagcattgcgacatgtgccaagcttcccgccaagtcttcttttgccattttttgatcaaaagaaatcgaagcaccaaagtcatcaatccatgcttcacttttcccttgaaaacgtccgccccatagtttttccattttttacacctcagttgttattgtaacttttgaattgacttctgcgctcactttcgttggtagtccaaatagcttgatgaaaccaacagctgcatcttggtcgaatgtatcggaagaagtataagtcgctaagttttcatcataaagcgaattcggtgattttcttccttcgacgatggcatgacctttaaatagttttacgcgaatcgtaccgttcacgaatttttgcgtggattttaagaaggcaattaatgcttctgttaaaggcgaaaaccataagccattgtaaattgtttcgctgattttttgttcaataataggtttgaaatgtgccacttcacgaacaaaagttaaatcttctaattctttatgtgcagtaatcaaagtgactgcggcgggacattcgtatacttcacgtgatttaataccaactaaacgattttcgatatggtcaattctaccaacgccatgttttccagcaatttcgtttaaagtaagaattaaatttgctaggctcatattttcgccattaagagaaataggaataccggcatcaaatgtaatttcgacaatatccgccgtgtcaggtgcatcttctaagctaactgttaagtcgtaagccgcttctggtggcgttgtccatgggttttcaagcacaccacattcgttacttctaccccaaaggttttggtcaatcgagaaaggattatctaaatcaattggaacggggatgttatgttctttggcgtaattgatttcttcttctctagaccatttccagtcccggacaggggaaacgacttttaaatcaggagcaagggcgtggatcgctacttcaaaccgaacttggtcatttcctttaccagtacaaccatgagcgatagcagaggcaccttcttgacgagctacttctactaattttttcgcgattaaaggacgacttaaagcagaaataagtggatattttccttcataataagcatgagcttgaagggcgattaaagcaaagttttcggcaaattcttccttggcatcaattgtataagatgcacttgcaccgacagtaatcgctttttctttaataaaatccaaatttttcccttcaccaacgtctaaacaacatgcgataacttcataacctgattccactagccactgaattgcaacagaagtatctaacccaccagagtaagctaatacgattttttctttcgtcattgtaaacatcccctattcataaatatacaaacatttgtatttatattaacacctatactctcatatatcaacctttttattttaaaatattcatcattatgattaaaaatacatttcacaagaaaaatagccatttcaaatagtaataaattggttcctgttcgtaaaactgctatacttgatattgaagttatattgaaggagttgaacgaatatgaaaaatgcaataaaatggattgccattggttttgcaggaattattctacttccgttagtaatcgttttctttatttacaaaaaagcggttgggaaaaaagaatatgatcccgaggtacttgagaatttagatgaggcttcccaggaatttgtaaaaaatacttcaccattgtcagatgtagactcgcgatataaatatatgagacttgcgacaaaagccttgccttctgctaaagatattgaaataggcgatgtcgaaaataaaaaaattgacggtccagctggtaaaattccgattcggatttatacgccaaaagaggatggaccattcgagattatcgtttattatcatggtggcggatttgtgttaggtggtttgcaaacacatgatgcgattgcaagaaaacttgtacaaacaacaggtgctcgcgttgtcacagttgactaccgactagcaccagaaaatcctttcccagcagcagtggaagatgcttatgctgcattactttgggtacaaaaccaccgtactagtttacgcgctaaatcctccgatattattgtcgcaggggatagcgtaggcggaaacttagcaacagtagtgacccaaattgccaaagccaaaggaaaaccaaatgttacggcacaaattttactttatccagcaacggatattttcagtcgtgatgcttcagtgctttatccgtcaatggatgaatttgcggaaggatatgtacttacaaaagaatctttagacaaattctttaaattatatattgcgaactcaagcgaccgtaaatatgatcctctgattgcaccaattcgtagtaaagacttagctggtcttcctaaaacattcatcgcaactgctgaatttgatccactaagagatcaaggagaagcgtatgcgaagaaattaaaagatgctggtgtagaagtatttgcgaaacgttttgaaaaagttccgcacggctttatgacaacaacatctgaagcaactgatgagacttacgaattgattagcgagtttttagaagaaaaataaatctttgaatccactctttcacgagagtggatttttttattgacaaagaattttattcatgagagaattacttacgaacggtcgtcagttttttgaaaggggtgaaaagatgagaaaagaagaaataaagcaagcagcactgacactttttgcaaataatggttttgaagggacatcccttgctgatattgcaggagttgtagggctaaagaaacaatccatctattctcattttaaagataaggatgatttgtttttatctattatgaaggacgcgaaatctacggaaattgattattaccgagcgaaacttcgagatagtgatttatctaggcccgacttagtgttatctagtttactttttggtgtgaaggaattatatgataccgatgaggcttaccaattttggttgcgatacgggttttatccaccgaaacatttgtatgatattgttcaggcagatattaccgagaatattttgcaaatggaacaagatttcactgatttatttagcgattggattgaacaaaagttgattccaatgcaagatgtcgaaacgatgaaagaagcgtacatgggaattcttgacgcggttatcgtggacattgtttatgtgaacgaccccgaacgaacaaaaaagaaaatcacagctttatggcaaattttctggagaggaattacgctaaaagcttaatttagaggtgtaacatggcaaagaatatagaaatattagaaacagattcagttaaaaagatttattttagatatttagttccttccttggtcggaatgttattaatgtctttgaatattgtaattgatggaatttttgttgggcataagctcggcggagtggcgcttgcagggataaatattgctgtacccgtatttacgatttttacagccatttcgatttggattgggattggtgccgcgacccagttttcgtttgctattggagaaaaaaatgttcctaaagcgcaatcaatatttacgaatgcaattttagcagttgtttcgattacggtggttattgcaatcctcgcttttatttttaaagtaccactagcgtattttttaggtgcgaatgatgaaacgattggttatgtactggaatatatgaatatactacttattttcgggtttgcacttacacttgaaaatattttaagtatttttgttcgtaatgacggtgatccgaatttatcaatgattgcccttattgttacagcaatcagtaatgttattttgaattatttattcttatttgtatttgaatggggcgtaaccggatctgcgcttgctacgatgattgcaattattatcggtgtgcttatcctaactacccatttctttaaaaaatccagtcgcttgaaatttgtaaaagtgaattggaataaagcttttttcaaaaaaacactgggcatcggcttgccaagttttttagcagaagttggcgtgtcggtatttactttcggatataatatttccatcgcagccattgctggtactgcaggagttgcagcattctcagttttaaattatacccatagtgtgattttaatgttgttccttggtatgggttcagcgattcagccacttattagttattaccgcggtgcaagggcaagagaaaaagaaattgaaacattgaaaattgcgattgtcgtagcatttggtaccggggttgctttcttattagttgggttatttggttctaatctgctcgtttcgatgttcggaaactttagtgcagaaattcgagaacttgcaagtaacggaattaagttattctattcagcttacttatttatgggctttaactttgttatgatgacttacttccaaacttctgataaagtcaaaatggcaacatggattacgatttcacgagaaattattttcatggtgattttcttgcttattttgccaccaattattggcattccaggtgtttggttagcaattccaatttcagaaatgattgtagctatatcgattgtattttacatgaagaagaaacatatcttatttaaataaaacaaagacggagatctagtatcttcgtctttttaggatgatttggcaaaaaaataagattaaaaagagtatatttccatttgtttcctttttcctcagtatggcgatttaaatggtaaaatattgttctacgtttccgtttacgtaggaatgctttaaaaagggaatgaatagttactattttatggactcctgagtgttttaggaatcctgttttactttgctgttttatagttgcatgtgggagcaatggaaactctgtagggaaatgtatgagggataattttacagaaaatgcaaaataaaataatagcgattcaaggaattttttaatgtctttactttgccattggtgtaaaaagctaatggcgaaagtaaagaaaaacattaaatatggcaaattagtgaagcgtgtaaagatgcttgaaatcaagtctagtactgattttaagccttgtgtaagactggataattataaccgaaaaaacattcgttatgaaaagaagctaaaactattaaataaggtatttgttttctaaaaataaatgtatataattaaaagaaaagttttctaagtaatggcggtgacatcatggatttaatcggtttacgaattagaaatatccgtaaaataaaacaacttactttaaaagaggcggctaaaggaatcatttccgtcccttatttagctaatatagaaaatggtgtgaaagtggcttcttttgaaacgttaatgcatatagcgaaacgtctggaaataccggaagaagctcttttaataggtaatgaagatttaaataaagaattattacaagaactcaagcagatatttgatttacttgttttttcaaatacaaaagaagcgggagatagacttgatcaaatagctgcgaatgtcgatttactgtgtgaatctcctgttatagaacttagtttttactggcttcaagcaggtttttactataaaacatgggaattttctaaagctagagaaatagaaagaaagtatttgaatagtaatgaaaagcgtgtagtggagtcattcccaccggatttgcttagttattattactatgggcaagctgtgaaacattctcatgctacttgcgactatcaattggcagtggagtactgggaaaaaagcattgatttaactgataaagctgcgtttcaagtggtttttcaagtggggctttgtattaattacatatgtctaaataactatgaacctgctttaaaacacattgaatgtgcctggaacttaattaagagattcccgagcaaagaccaagaaagaatcacggccattttatatttgtatggttatataaactttcaaattggctttatgactgaagcaaagcggaaatttgaagaagtgctagtattttttaacatgtatccagaagctaaaacaatgtattcttttcttgttcgctttaagctggcagaaatagaaagagttgaaggtaatcatgagttgtttgatgagaagatagtttgtttatacgaggaattaatggcgcatgaggcttccgagataggttttaataacaatgactaccttgtaattacagaactgatggttatttttgctgaacaagggtctgtgctagaagcaagtaatttactggctattattaacaaagtaactgagcaagtaatggaaatcaatttttttgtaacctatacggaaacattactgctgtaccatcaaaacaagcaatctagctatgaaaagaaaatgttagacttgcttaaaaaaattgatgaatccaatgatccagcattaattgaacgcgtaaaaaaacacgcaagtaagcacttcgctgactcaacgaaatataaaatggcatataatattttagcttagtataaaaaaggaagaccagttcagtaattaacgtggttttccttttttcgttggagtgtaatttgttctatcaaaaaaggtttcgtaactgtatgaacaattacgaaacctacttgtagttctctatgcggccgagaggacttgaacctccacgagttttacctcactaggccctcaacctagcgcgtctgccgattccgccacgaccgcgtatgcgtagcaaaactaattataatattgattctattattttgtcaataaattctgcacagataattggaaaaaagtaagcgtattcttgtataatggagaatagcgaatttattggagggagagctaattatggatgtgacccaattgaaaatgttgcgtaatgcgaaagtggtttcagaaataaaaaagggtttttctatcgataagaaatatcaggtggatgaaacctatcttgtacgtgtttttccaaaagagttactccaaacacgaaagcaagaatttgaaataatccaagcgttaggttctcaaactccatttgttccacgagcatatgattttggctgtaccggcggagaaggctatatgattattggttatgtgcgcggtgaagatgcggaaaatggcatgtttagattatcacattccgaacagtttaaggctggtttttcagcaggggaaattttacgagaagttcataaaataccgctagatataccaaaaatgaactggttggattttcaaacggctaaatttaaacgaaaagtggaggaattaaaagaattagaaataacagcttcttttttaacagaaaccgaacagtttgtttatgagaatatagctagattaaaaaatagaccggtttgtttacaacatggagattttcatccagcgaatattattttaaagaacaaaaagtttgcggggctaattgattttaatcggctagagttcggggatcctttatttgatttagctaaaatcggcttttttacaacagaggtcagtataccttttgcgcgaggaaatattttaggctatattgataaagaagaagttacggatttttggaatctttatgcgctttacacggcgatgcatattacttcggccgttaattgggcggcaaaaaatgaatctcgtaattttaataagttaatgaattacgcagcaaagacggcagctagtcatgataattttcagaagctgatgccagactggatgaacaaggaggaattcaaatgactgaaaagaaaattgattttaaaaaagaggaaaagaaattctatgcgcctaaaagaaaaccagagcggatttttgttcctgagatgaattttttgatggtggatgggaaaggtgacccggatggtgaagagtaccaaaaggcggtgcagtctctttatgcgattgcgtacacgattaaaatgagcaagatgggcgagacgcgtctggatggttactcggattttgttgtaccgccgctggaaggtttttggtggtctgaggggaaatttgatttaaaggacagagatgcgtggctttggacatcgattcttagacaaccggactttgttaccgaagaagtgttggagtgggcgaaagaggttgcaaggaagaaaaagcctgacgttgatacgagtcgcgtgaaattggttcgttttgaggaaggggaatgtgtgcaaatgatgcatgtggggccattcagcgaggaagtgcatactgtggcggaaatgcatcaatttatggaaacagaagggcttcggaacgacaccggagctattcggaaacatcatgaaatctatttgagtgatccgcgaaaagcaaatccggaaaaaatgaagaccatccttcgacttccagtgagttgaataattggaatgttttgcgttatagtatagaagaaataggacaaaggcgactgcccgaaatgtaaatatttcagggtagtttttttgtgaagtggggtttttaaagatgtattttttatatgtggggatttttggtgcgttaggcggaatgtgccggtatgcgatgaatttatggcttggcggcggagattttccttctgcgactttagcagttaatctaataggttgttttttattagctttcataatgccttttttggcggaaaaatcgcgtatttcattggtgcttttaaacggaattgggactgggtttattggcgcattcacgactttttcggcatttagtgtggatacgattgaattattgcaacaaggtgaagtggtgttagctattagttatattttggtgagcttaattggcggccttgtgatggtgaagtttggtagaagatttagtaataagctcttgaggcgaggtgcgcatcatgttgattaatttcttgcttgtcggttttggtgcaagccttggtgcgatgttgcgttatggtatttctatatttgtcaaaagtaaatggaaaacggattttccttatgcgactttttttataaatatcacaggatcatttttactaggatttcttgtttctactgcgcttgggccaatgtggcagctttttttaggcacgggttttatgggcggatacacgacattttcgacttttaaagtagagagtatggaattaaagtggaaggcaaattttcaggtgttattttcatatgttggtttgacttatttatgtggtttaatcgcagcttttatcggaatcatgcttggtgtataagaattgtttaagaaaataagaaaacgattgcctgtatttacgcaagatgctatgctagaaagaacgaaaagcttcagagaggacgagaacaagagatgacaggttttaagaaggtaatctggtcggttttactagtcgtaatatttttggcaggctgtaatcaggaagtagttcctgctttagtccttgatggaacagtgacagatgctagtttattagaaaataataaacaattaactgtaaatggcacgttaacatggagcggcgaaaaaaataattatgcgagcgaactaattgtaacggttaatagcaatacggcggtaacaaacgctaccactggaaaaacgatgaaactttcggatattaaagatggtgatacgattaaagctacattcccacaaggcacaaatgtaacttcaccggcaccagggaaaatttctgaaaatgcaacttcattaaaagtaacaccaaaataaaacgttccctttttagggggcgttttttaattaactaagtgaaaagttaagttaattgtgactaactagtgaataatctataattctccttgttttctgtacttaaattgtgttagtttaaatgtattaacgatacagggggagaactatgaaaaaagggatattattttcaattttgttagctttagcgttagtaatcagtgcttgtggtggaaattcagcagcgaaaacaccgcaagaaaaatttgttcaaaccatgaaaaatgcaactaatgtaccggatcaatctacatatacaacttcttttgccgtaaccgatatagatgttgcgagtgctgattccagcgctcaaacgatggggattttaaaagatattaagctttcaatgacaacttcaacagataagacagcaaaaaaatcagaaactaaattaaacttaacttccacgaataatttacttccagtttccattaatttggacttcttattagacagcaaaacaggtaatgtctttattccacttaaaactattgttcagccagatgcttcattactaagttatttagaccaatcaactggtggcatgtggtcacaaattaataccgaatatccagatttaaaaaacaaatatcttagcacggaagaattaaccagttcattaacaggcaaatcagaagctaagactgctgctaacacaaaagaaatggaagcagcttccaaagatttaaataaaaaaacgactaaattaattgatagttatttcagtggtgtagaaaaagatcgttttaaagaagcggatgatggcacacttacaatcacacttacaaacgccgaccttgctaatatgatgaatcaagtagcaaaaatgatggacgatgaaaaagtaaaagcagactttaaagttattgtagaaagtcaaggttcagaagcggtaacagattttgatacgacttatacagaaatgcaaacaagcataaaagacgcagctaaatctttaaaagacaataaagacacgagcattcacattaaagtttctgtaaaacctggcaaagacaattcatttgatgcaatcactcttaaaaccaaaatcgatgataaatccgatgctaatgcagagcaatcaattagttttactgtgaaaacaaaagcggagaaatttgttccaatagcagatttcccaaccaaagaccaacttatatcgagcgaagaattaaataaaattattactgaagttaccatgaaaatgtacggtggaatggatttaactggaactggttattaattcatccgaaagacgcagcggcttaggtcgttgcgtttttttgatttttattttggcgcggctttgtggtatgatatgtagagaaaatgatggacgggtgaggtaatggaattcgaattaataatgacaagtgaggtagagactaggcttctcgcaaaacaacttggtgaacaattggcagccggagatgtaattttacttgaaggcgatctcggcgcggggaaaactacttttacaaaaggtcttggtgaaggtcttttgattccgcaaatgattaaaagcccgacattcacgattatccgcgaatataaaaaagggcgcttgccactttatcatatggatgtataccgcttggaggatgcttcaactgatgagctcggtttggaagaatatttctacggagcgggtgtgagtgtggttgagtgggcgcagtttgttcgggaggatttaccggaagaatacttggaaattaagctttttcatatagatgagaatacgcgcaagatgatagtgaagccagttggagaacgatatgagcaactggcgatggaggtttttgggaaatgatacttggaatggatacgtcttcagatacgatgacgatagcactttttaatgaaggtgttgttcttggtgaatatacgacgaatttgaaaaaaaatcatagcgtgcgattacttccagcgcttgctgctttaatggaagaatgtgccgtaaaaccaactgatatagaaaaaatcgctgttgctaaaggtcccggttcttatacaggacttcggattggtgtaaccgttgcgaaaacaatggcgtgggatgctggaattccaattgtcgggatttcttccttagcacttttagcagaaaatggtttatacttccccggaaaagtcgttgctttgatggatgctcgtcgtatgaatgtgtatgcgggtgtttatcgtgcaagtgacggcgtaatgaaaaacgttgtagcggatagccatatcgcacttactgatttacttgaacaattaacggcggagaaggaagcgattttatttgttggcacgttaacggaacaaattcgtcttactgtgacggaagttttaggggaacgagcggtatttggtcaagctgattatacttatgcgcgggccagctcgcttgtaaaactggcggaaaacttggacggtgacccagcagacaattttgttccagattatttaaaactggcagaagcggaaagcaaatggttggaatcgaggggttctgagtgagtttggacgcggccttagtatttcgagaggcaactgttgcggatttaaaaagtattatgaatgtagaaaatgctgcatttacagtaccttggacagaagccgcttttcgaaatgaatttattattaatcaatatgcctactatttacttgcgacttataaggatcaagttgtcgggtacgcgggtgtatggctggtgctagatgaagggcacattacgaatattgcgattcatcccgattttcaaggtaatcactacggcgaggcacttttacgggaaatgattcgtgttgcaaaagagcgcggtgttgttcggatgacattagaagttcgcgtttcaaacgatgtagcacaagggctttacaagaaattaggatttcaagacggcgccattcggaaaaactattatccggatacgaaagaagatgcgctagtgatgtgggtggacttatgaaaaaaaatacattaattcttgggatagaatcgagctgtgatgaaacagctgcttctgttgtgaaaaatggttgtgaaatagtatctagcgttgtggcttcgcaaattgaaagtcataagcgattcggtggtgtggttccagaaattgcatctcgtcatcatgtggaacaaattacgcttgtgattgaagaagctttaaaacaagcgaatgtaacgatggacgatttagacggggtggcggtaactgaaggacctggtttagtcggtgcacttctaattggcgtcaatgctgcaaaaacacttgcttttatgcataatttgcctttagttggtgtgcatcatattgctggacatatttatgcgaatcgctttgaaacagaatttcaatttccgcttttatcgttagttgtcagtggtgggcatacggaacttgttttaatgaaagcagataatgaatttgaaattatcggggaaacaagagatgatgcggccggcgaagcatacgataaagtggcgcgtacacttggtttagcttatccaggtggtgttcaaattgataaacttgcaaaagatggtgaagacacgttccattttccgcgggcgatgatggatgatggttcgtttgactttagttttagcggattgaagtcttcttttattaatacgttgcataatttaagacagcgcggggaagaaccaaatcctaatgatatggcagctagttttcaagctagtgtagtcgatgttttagtaagtaagacgattcgcgcagctaaacaacatggcgtgaaacaattgcttcttgctggtggagtggcggcaaatcaaggtttaagagagcgacttattcaagaagtaaaactagaacttccggataccgagctgattattccgccgttatcgttatgtggtgataatgcggctatgattgccgctgcagggacagtgagtttcttacaaggaaaacgaagcaattatgatatgaatgcaaatccaggtttattgctggaagacatttaaaaaagcatgcggagttaaatttcgcatgcccgggactgcaagcaaagtaatttctcactttgcttgcagtctttttttacattgttttagttaaaaattgtcgtactttttcttcgtaagtttctggctcaacagtgaatgcttgaccatgttcagcgccttttacaacccatttttccttgtagcttttggtggcgtcatatagttcttctaccatagaagtagggacaaatgcatctgaatcaccgtgaatatagaaaataggtaaatcagtttcagctacggcattaatcgcacttgcttcactgaaaaagaaaccttcttttactttattgataagactagccattggaatgattgggaatttcggtaaatgaaacattgcttttaattgataagctagttcggcgtccatggaagtatagccacaatccgcgataatactttttacttgtttcggcagcttttcggcacttgtcatgaggacggtggaactccccatggaaacaccatgaaggacaatttctgtatcatcgccatttttatcgagtacttggtttgtccactgaacataatctttacgttctggccaaccaaagcctatatttttcccttcactttcgccgtgtgctcttgcgtcaggcattaatacattatagccgaatttttgattatacatccttgctagaccagccatttcgactttgccgcttttccctcgataaccatgtgccaaaataatggttgtattggaaggtgagggtgcttctaaataattagcgactagtttcaagccatctgctgaggtttctgtccattttgttagacgttgctgctccatccaagcgatattttcttggcgatttttcttcgcaagtttggctgtttttgtagtttgatcggcagtcggtttatcattcatacttgaattatcacgagatagcgcatagctatataagtaaaaacttgcgcaaatactaataattacaagtaacccaacgataattgaaccagaaataattaaaatctttttcattgttagctcctttttttatgtagattacatagattctagttcttcgcttactttttcccattcctccatcaatttttcaccacgtgcttttaccacatcaagttcctgcgtaatttcaaaagctttctcatggtcttgaaaaatttccggtttggttaattgaagttctagttcggcgatttttttatctgtttcttccatagacttttctacttcttctagtttgcgttttctttgacgaagtagtttttgttgttctttttcttcttgataatttagttttctaaccgaggcagttgcttcgacaggttccccttttttacgacgatcttctgcatcaaggcgcgctagttcttttgcttcggcgattttttcctgataataatcataatcgccaaggaaaacggtcgctttttctggagctagttctactactttagaagcgatgcgattaataaagtaacggtcatgagaaacaaatagaatcgttccttcaaaatcaatcaaagcagcttctaaaacttctttactttcaatgtctaaatggttggtaggttcatcaagaattagcacattggcttcaagtaaagtaagtttggcaagagcgagtctagctttttcaccaccactaagggattgaacgttttttaggacgtcatcatctgaaaataagaaattacccagtgttgttcgaacgttcacttcatttaattctggataatcatcccaaagttccattaaaacggttttgttggatgttagtttagcttgttcttggtcatagtaaccgattttgacacctgctccaaaatgaaattcaccgctaagagctggaatatcacgaataagtgttttaagaagggtagatttaccgattccgtttggaccaacgagcgctagactatcttgacgtttcatttcgaatgttagattggaagcgatgcgcttgtctttggcgtaaccaatacttaatttatctaccattaaaacatctttaccagtttgcttttcaaattggaagccaaaatgagccgatttttcgtcgccttgaggtcgggcgagtacatccattttttctaattgttttcttctgctttgagctcgcttagtagtagaagcgcgaacgatatttctagcgacaaaatcttctagcttggaaatttgtttttgttgtttatcgaattctttccacatttgttcaagtttagcttgtttttgactaacaaatgaactgtaatttcctttgtagtgatcaattcttgtgcggctaatttcgtatacttggttaacgactttatctaggaaatagcggtcatgagaaacgataagtaaagaaccatgatagttttgcaaataggtttctaaccatgctagtgtttcaatgtctaaatggtttgtcggttcatcgagaacaagaatatcctgtttcgcgagtaataacttagccagcgcaagccttgttttttgcccaccactgagtgaggcgatttctacttcataatcttctggataaaagcgtaaaccgtttaaaacggaacggatttctgcttcatacgtatacccaccaacttctttaaaagtgtgttgcaaggtatcgtaatcggtcatcaatgcttgatatttttccggattattataaagctcaggttccccaagacgaagctccattttgcgtaaatctgcttccatttttctaagtgaatcaaaaacacttaacatttcatcccagattgttttcgtggattcaaggccagtattttgagccaaatagccaatttcgacacttttaggtttagaaattgttccgccgtcataactcatttttccagcgataattttaagtaaagtagatttaccagcgccatttcggccaactaaggcaattcggtcgcctgtttttacttctaatttaatattatctaaaataacttctgcaccgaagaatttagaaatttgctgaacttgtaataatatcataatctctctcctcgaacgttctccttactagtttatcttaaaagccaagtaatcgcaatgagagaagaagggcttcacgtataagatagattgtgaaaacactcgcattatttgtgattttagcgtagaatggaaaagaaggaaaacactagatattttgcgggacaaactattgcttgaaaatcatgagcaaaaagtttgtgcattccttgtgaaatgtttatagtatataagcaagcatgtgaaaggaagtacagttcacaaaagcttcaacttcagaaaaaatttaaaagaagaagggacagaaggcatgatggaggaaacaacaaaaattccacaagcgacagcaaaacgcttaccattatatcatcgttacttgaaatacctagatgaatcaggtaaggaacgagtatcatctgcggaattaagtgaagcggtgaaagttgattcagcgactattcgacgtgatttttcgtactttggcgcattaggtaagaaaggatacgggtataacgtttcttacatactcgactttttcagtaaaacacttagtcaggacaaacagacaaatgttgcactaatcggtgtaggtaacctaggtacagcattattacattataatttcatgaaaaacaataatatcaaaatcgttgcggcatttgatgtagacccagcgaaagttggtagtgttcaacaagacattccaatttatcacttaaatgatatggaagaaattgttcgtgaaaatggtgtggaagtagttattctgacagttccagctgatgaagcacaagtaactgtagatcgtttaattgaagcagatgttaaaggtattctaaactttacgccagctcgtattagcgttccaaaacaagttcgtgtgcaccatatcgatcttacaacggaattacaaacgttaatctatttcctggaaaactatccagcgaaaacagaataaaaaaacctgtagaaggtaagcaacacttactttctacaggttttttttacgtcttttaagcccagtgataataaggccaataccaataccaaaatcaattaacatcatgagtataagtatataggcaacaagatcataaccatattcagccactcgaacaataacaaaatagacaaatacaagaccaagcgcaaaataaagaaaactttgctttattaatgaatttttcatattatcctccaatgattccaagactcacgagcaaaacaatggtattcattaaaatatgtgcgcccatcgaaacagcaattcgtttcgttttcgtataaagaaaacaaagaattagaccgatgacaaaataagtaagtaaaaaggaaatatccccgtgaagtagcccaaagaatagcgaactaataactgcagccacatgaatgttcatcacattactcagcccaccaaaaaccacttttctaaaaacaagctcttctaaaattggcccgagaactgaaatgaaaatcaagaaaataggcgcagatctagttaaatcaacaagtaattctgtgtttgccgattcaccaatattcccagaaattagcgttagaataatgctacaaataaattgtgctacgtataacccaatcactccaccaataatccacacaatactcagaaatggtgcagttttttcaccgagttcgattttattttcttttggttttctataaagcattggaataataatggccagtgataataaattagaaaaaatcgaccatgtaattaccccataagtttgagcatccgctgtagacatcgaagtcatactaagtaaaatatgttgaacaacgggaatcccaatagatgcagaaaatagtaataataaataaactaatacaatagtaatataacgtttaggcaaaaaatacgcatcccttctaaaaacaagctccagctaaatgcttaaaaatagcggaaatagctcttcttattgtactagttatcacgctttaccgcaaataagaattctttaatttttaaacgtttttgcttgcaatttttatttagtttggtatcataataactgtattagcactctaatgtgtcgagtgctaaaatgaaaaatgtaattatatcagaggaggtcatttacattgttaaaaccattaggagatcgtgttgtaattgaagtacttgaagcagaggaaaaaacagcgagtgggattgtattaccagactctgccaaagaaaaaccgcaatcagggaaaattgttgcagtcggttcaggtcgtgtgctagataacggcacaaaagaaccacttgaagttgcagaaggtgacacggttatcttcgcaaaatactctggaacagaagtgacgtatgaaggaactgactatctgattttacgtgaaagtgatattttagcaattagtaaataataaaaaaagaaataatcggagggaaatataaaatggcaaaagatattaaatttagtgaagatgctcgtcgtgccatgttacgtggtgtcgaccaactagcaaacgcagtaaaagtaacgcttggcccaaaaggtcgtaatgttgttttagaaaaaaaattcggttctccgttaattacaaatgatggtgtaacgattgcaaaagaaatcgaattagaagacccatttgaaaacatgggcgcaaaacttgtatctgaagttgcttctaaaaccaatgatgttgctggggacggaactacaactgctaccgttttagcacaagcaatgattcaagaaggcttgaaaaacgtaacagctggagcaaatccagtaggcgttcgtcgtggtatcgaaaaagccgtagcaactgctattgaagaattaaaagctatctctaaaccaattgaaagcaaagagtctatcgctcaagttgctgccatttcttctggtgatgaagaagttggtaaattaatcgcagaagcaatggaacgtgttggtaacgatggtgttattactattgaagaatccaaaggctttgcaacagaattagacgtagtagaaggtatgcaatttgaccgtggctacactagtccttacatggtaactgattccgacaaaatggaagcagtccttgaaaaaccatacattttaattacagataaaaaaatcaacaacatccaagaaatcttatcagttttagaacaagttgttcaacaaggtcgtccaatgttaattatcgcggaagatgttgaaggggaagctcaagcaactctagtactaaacaaacttcgcggaacatttaacgtagttgcagtgaaagctcctggtttcggtgaccgccgtaaagcaatgctagaagatattgctgttttaactggtggacaagtaatcacagaagacctaggtttagaactgaaaacagcaacagttgatcaacttggaacagctaacaaagtagttgtaacaaaagatgatacaacaatcgtagaaggagcaggcgattccacacaaatcagcgctcgcgtaaaccaaatccgtgcgcaaatggaagaaactacttctgaatttgatagagaaaaattacaagaacgtttagcaaaacttgcaggtggagtagctgttgttaaagtcggcgctgcaactgaaacagagctaaaagaacgtaaattacgtattgaagatgcccttaactctactcgtgcagcagtagaagaaggtatcgtagctggtggtggtactgcccttgtaagtatttacaataaagtagcagcactagaagcagaaggcgatgtagaaacaggtatcaacatcgtgcttcgttccctagaagaaccagttcgtcagatcgcgcataacgctggacttgaaggttctgttatcgtagaacgcttgaaacacgaagcagttggcgttggtttcaacgcagctaatggcgaatgggtaaacatgattgacgctggtattgttgatccaacaaaagttactcgttccgcattacaaaacgcttcatctgttgctgctcttctattaactaccgaagctgttgtagcagatcaaccagatgaaaacggcccagcagcaggcccagatatgggaatgggcggcatgggcggtatgatgtaattcatatcaaccgaacaataaaaagatctctgaattttttcaggggtctttttttgtattaaatagaagtcagctgccacatttttataacaacaaaccaaaacttgtcacggggcatacaattttgggacctaaaaagtaatcagttctctcctaaccattgttataataaaagaaaaggagatgcacttgctatgagagaaaattccattattggtcgaattattgcattttgtgcgatttgctttgcattttttaatccgaaaacggtgacttattggcttggagtacgcgcggaatctgggccggcttggtatcttacaacagttgtcgcatgcggaattgcggttttcgtactgatcgatttaatcaaaaaaataatacgaagaaaagcagcagaatgataattttcgtggtatactactagaaaaacgactaggagaacgccatgaactggacacgtataagtagtattttaatagttggttttacagcatttggagcaatttatgggggattatcgatggtttttaagcctagtggtagtcttttatcactttcgaccggattgcttgatggttcaccgtttgtcgattatttaatcccaggcatatttttattcatatttgttgggttattccatttagcagcactaatttatttactaaaaaaattaccacgaacaaaagaagtcatgtttgcagcagcggctgtactcgcagtttggatggttgtccaaataatcattatcggttatgtatttattttacaaattatctttttagtagtcgctgtggtggaaatgttcttagcggtacaattaaagaaacaacaacaataaaaaaacaggaacctttagtcagaaataatgacttaggttcctgtttttttatgtgcttatttttgttgttcttttaataaatcgcgaatttcttttaagtattcttctgttggaggtactggtgtctcttcggttggttgttcttttttcttgataaaactagtaagtactttgacaaaaataaaaatggcaaaagcgatgatgacaaagtccacgatggattgaataaatgcaccatattgaatgactgattttccaactttgaagcttaaatctgagaaatcaagaccaccgaggagtacaccaacgaatggcatgatgatgttattcactaaagatgaaacgatttttccaaaagcagccccaataacaacggccaccgcaagatctagtacattcccttttaacgcgaagtctctaaattcaactaacatttttttcataaaattcacctcccacatctcagtataaaacatctaactgcgatgtgaaagcaactgaacttattttagtaataaactgccgatgtatagtgtcggggccattaaagcataaccaataataataaaagtaagtgttcgaagccagaaagagcccagaatatttggtttccatttagctaagagtgcttgaagccacatcgtgatgagtgtaacaaaagcaaacataaaaaataattcaatataacgaagcatagataaaatcccccttttccttttctttcactatgccataatcgctatatcttttgcaatagcgagtgagccaattatttccattcaattcttgcacgtgataagttaaaaagagtaaaaccgttcgttcgaaaaaggagcagcaaatgaaattatttaaaaggatcagttttattttaatcgtcttatacatattaattgtgccagttcagcatgtttcagcgcatgcttatttggaaaattcaaacccagccgatcaatcgcatataaaaacagcgccagaaaaagtaacgctcgtttttaatgaagaaattgaagcggattttcctttaatagaagtaaaagattcaagtggaaagcgggtagaaaccggcaaaacctctgtttctaaaaagaataatcatatggttgaagcgtctctaccggctgaattaaaagcagatgtctattctgtttcatggcgtgttgtgtcagcggatggacatgcggttacggggataatttcttttaagttaggcgatacgaaagcgacgttccaagaatcggaagttccctcaagtggagcggacttgcaaattagttcgattcaaaaagccattttatacataggattttcgttgtttatcggtgtgcttgtttttgggttaggactttatccacgaaaagaacagatatcagaaaaaatttctggacgtttgaaaaaagtaacttggatagcgctagcacttctaggtgtggctctcttcatgcaacttttcgtacagacaagtatcacaacgggcgtttccatcagtgaaagttttgggccgagtaagttagctgctttcttgactacgaaaacagggtatatttggatcagtgaatttatcgtatggctgctacttgccatttttaccatcatgatgttctttaaaaataaacaatggagctggttcgcgcttctgacagagagtgcattaattggttatttgatttttgcgaaggctcagaatggacacgctgcagccagtgccgataaaatagtaagtatcacagcagatatgcttcatatgattgcagcaagtgtttgggttggcggcattttagtactattattcgtattaccgaaaaccggaaaagcgcgtgaaatttggagcagatttgccattgtagcaatcatcgcggtagcttcaatactcgttagtggcttacttatggcagtgatgaacattggtcaaatgtctaatttatttacaaccaactacggcaaaattcttcttttcaaaatcggtctatttttactaatggcattattaggtttaggacattacatctatctcaaactcaaaaacaaaaagttgccatttaaaacgattttaattgagcttatcattgggacgatcattcttatcgtcgcaagtgttttaacaaacgtacaaaccccgccaccacctgccccaaaagcatttgatgaaacaattgcagcaaaaggcgaaaatgcaaaaatcaatttacgagtagagccagcgacagtcggacaaaaccaatttattatcacttttacttccgcagatggagcaaccaaaacagatttcgaacaagtgactatcacaacaaaatctactaaaaccgatgaaaaagccactttccaagcaaaacttgcaaatgagaaccaatattttgcagaaggactttatattaaccaaactggaaaatgggaaattacggtccatggcctaacgaaagattttaccgatattaatcagacatttacaaccaatattacacagtaaaggggaaaaacaatgaaaaaaattattagttcgctcgtcgttttattagcagtttttattattccatttgaggcaagtgcacatgtgtcagttttacctagtgagtccactgttgattcttgggagacttatacgatgaaagtaccttctgaaaaagacgctgcatcaaagaaaatcgttttaaaagtagcgaaaggtgtttcatttgaatcatatgaaccagttcccggctggacgactacagtagataagaaaaacagtacagtgacatggcaaacggaaggcagcgggattgaaaaaggtcaattccaacgttttagttttatcgccaaaaatccaagtgaagaaggagaagttgcttggaatgcctaccaatattatgaagatggctctattgtcgagtgggttggcgcagaagattccgaaacccctcatgcaacaacgaaaattttgaaagactcatccaaacaaacaactggctcacacggagaaatggttgcaggagccgagaatactgctggggatacaagcgagtctaatgacaataccattttgctatggacggcgcttgccattggtgtgctcgcattaattacaagcattcttgctatcttaagccgaaaaaaataacatcaaaggagtaaacagatgaaaccgaaaatcatccatttagcagttggaaaacccaaaaatttaatccttccaagtaataaacgaatgatgactggaattgaaaaaaagctcgttaaaaaagcccaattaactatgaatggctttgaaaacgatgcacctcataatttgaaatatcacggtggtgtggatcgaacggtatgcatttatccatatgagcattacgcaaaatgggctgaaatgtttggggaagaattacaagtaaccgcgtttggtgagaatctcattgtcactaatatgttagaaagtacggtccaaatcggtgataaatttcaaattggagaaaccgtaatacaagtaacagaagcacgaaatccgtgtagcacgattgagaaatttaatggaataccaaatctctataaagcaattcgcgaaacaggtttaacaggttatctgtgccgaacaattaccccaggggaaattagtgaatcggctgaaatgaaacaaattcatcaagagtcgcacggagtaacagttgccttttgtcatgaaaaagtattgcataaaaaaggcacacaagaagattttgagcggattttagctgttcaggctttatccgaacgttaccggaatcaagtcgaaaagctaataaaaaagtgatagcgtcattcgctatcactttttttggtctcgtttattaattcattttttctcagtgttaaaaattgctcaactactgcaatttcttctttcgttaaatcaggcgtatcggcaattaattgggtgattttacttgcgcgttgtgtgctagaagtagacgtttttttagcgcggaaaaagttggttaaagtactagttatcatcccaataaacgctatcccaaatagcatcattatcgatgccaaaattcgcccaattggtgtgactggaacaatatcgccatagcccacagtggtcgccgtaacgattgcccaccaaagtgcatcaggatagttgtttatttcaggttcaataaaaaccattggaacaggaataataatcacgagtaacacaaaaatcattaaaaatcgacttaatccattggaacggaaaaagctataaatcggcataatataacgtcttcccatcgcagtaatacttagaagatggacaaaacttacaatccgagccgctctgaaaccaccgtaaaaaggaataattgcaatcagctggaaaggatgcgtttttacataatgccacttatcatctgctcggtgaaacctaacaaaataatctaatgtaaatatcacccaaataatccaatttaaaataaaagtaaagttgtttctgtacggcaatagggcaagggaaagtagtatgagaccaagcataaaaatctcataaatcatttttctctttgttttatccaagttattcacctcgtttgacttatactctcacttattttagcataaaaacggctgaaaactgtagataaaacaaaaacagctgatgatttttggtcatcagctgttttctttatttaattcgtagccgattacttttacttcttgatgcgagtaagcataggtagcaaagtaaggcgaagagcattgtaataattaagctatgtgccagtgcgatatacaagttcactcctgtataaacagaaagcgcaccagtaaccgcttgaagagcgataaacacaagcgacaataccatactaaaagttaacacgcggtatcttctataatcgcggaacacaagccaagttacataaagcaaccaaccaattaaaataaatgcggctaatctgtggaaatactgaacataatcttgtactgaagtaggcataataaagtgcccattttcaaaacggccaaaccggaacagccatacttgctttttcgtggcgtacaagtgcaccagtataaacggctaaatacgtgtaaatcgttagcgcgtatatattaatgcgtaattttgtccccatgacaagatttctagcatcaaatttcctgtccacctcaaaaatcattaaggcaagtaacacgatcgacgcataacaaatgatggaaataccaaagtggagcgccatgatgtacggattttgtccccatacaactgctgccattcccattaacgcttgaataattaaaaataacacagcgataattgcaagcggttttgtttcacgacgatttttcatataaatccaagcacaaatcgctaatacaataacaaaaatcgaactgattcccgttgtcattcggtgcatgaattcaatgagtttttcaggggtaacatctgttaaacgaactaattgtccattacaaagtggccagctattaccacaaccatctgctgaaccagttttcgtcaccagcgccccgccaaacacaacgactgtcatacaaataatcgttagtacggaccaaacttttaagaattttttcattatctaccaatctctcctttagatgcgtgtgagattttactaaaatttgtttatatgtataagttcatgagtacacatcaaactaattgtagcgtgtttatttaaagaagtaaagcgtacaagactaaagccgatttattgacaaagggtgcgtatttttcacataataagggtataagatatgtatcagttcgcaatcactggtttatatcagcaagtgttagggggagaaaaattgaatcagatagaaaagactggggagttaacttcgagtagatttactgtccgtgattttaccgagcttgtgaaaatcggaatcgttaattcgaatacgattactgctttttcaggtatgtggctagcctttcagttaaatggaatttcttttattcaaaatgtagatgtaatatttttcactatcgtcggttcggcacttattgtcgctgcttcgggcgcttttaacaatgtcattgaccgtgatattgacggaattatggaaagaacgaaaaacagaccaacgatgaccgggaaaatttctggtaaacgtgcattaatggttgcacttgtgctaggtgtcgtcggaacaattatgttatttatgacgacttggcagcaggggttcttggtgtattggggtctttttgtatgtagtcgtttattcactttatgcgaaaagaaaattagttagtaataccgtaattggtagtttttcaggagctgtaccaccactaattggttggtttgcagttgaaccatcatttagtattgtgccaattatgctatttcttgtgatgttttgctggcaaccaccgcatttttatgcaattgctattaaacggaaagaagaatatgctgcggctggaatcccaatgttacctgttgtaaaagggattgaacgcacgaaaaaaagcatgtttttctgggtgattttattaaccgtattgccattctttatgtttgatttagggcttgtatatgttattttagcaaccttacttaatattggttggcttgcactaagcatttacggatttaaaatggacgacagcatcaaatgggcaaaatggatgtttgtttactcgctaaactacatgacaattttatttgttgcgatggtcgttatttcgattttcttataaaaataactgcaattacggagaaccgcattttgtcgcggattttcgtaattgtttttttatggtttttaaagcttttcaaatgatactagaattggtaaaatgaaagttacatcaagataaaccaaatactgccgaggagggcaaaatgtgaagtttattatgcgagtagctgtgctattaatcatttgcctgttcattggatataacacagatcttttttttagtaaatcagttgaaaaaaatacggccgaagatactgctacaaaatccgattttcctgatgataaaaaaacaacaaatgaaaatccgaaacaagtgcaagatagttctagcttggcgaggtttataaataaaaacgtaagcgagttgaaaaaagaatttggcgacccggtgcgtgttgataaaacagcatacggttatgataattacgtttacagtcaaccaggaactagttacatgttagttggagtgacaaataatgtcgttcaaactatttatgcgctcggacaagatttaaatgttatgccttattcaatcggaatgtcgacagaaaaagtatttactgacgcgaatttacaatcagaaatatcttttaattacaaagatagctattataaatttgaactttccgaagaagatttaaatgctcgaccaattgttaatatcggaagtggcgtgtatgcgcaactaaattttgataaatttaagtcaaaattagttagtgtccgctacttgaataaattagctttcataaaaatgcgaccttatgaattatcttatcaaggcgaaatttatgaagagaaattatctcaagaagattggaatgcgattgaccaagcttctagcaaacaagtgttagaaattacaaacgtcattcgcgaccgctacggtatagaagaagtggcgtgggatgaggaagtcgcaaaagtcgcctatggtcatagtgtcgatatgaagaaaaatgattattttgatcatacttcaccgacgcaaggggatttaagcaagcgattaagtgccggtaatgtaaaatatactaaagcgggcgaaaacatcgcttacaactatatagacagtgccgcagctgttgaaggttggcttaactctaaaggacatagagaaaacttactagatggttcttatacttatatgggtgcgggaacttatcagaagtactatacgcaaaattttattattaaataatcgttctatggtataatgaaaaagtaagtaagatggaggtggctagattgctcgctacaatggaaaatatggcgctactcgatttatcagatgagcttgctagcatgattctagactccgaagaagcacagaattataagtatactagacaagtattactagatgacgccaattcacaaaaaaatattcgtcagtttatacgaataaaagaacaatatgaggaagtacaacggttcggccggtatcatcctgattataaagaagtaaccagaaagactcgtgcttataaacgcgaagtcgatatggatcaaaatgtggcaacttttcgccgggcagagatggatttacaatctctcttggacgaaatcagtttgcttctcgcaagtgcagtttcagaaaatatcaaagtaccaaccggtaatccattttttgaaacaaaatctgcttgttctacaggtggatgtggcagcgggggaggctgcggttgttcagcgtaaagcttatcctaaaaagaaggggcttaaacaatggaaaatgatagacaagctatcgtcgtttggatgaatcatcttaaacaagttagatctttgaagcgatttggaaatgttcattatgtatcgcgcaagttgaaatatgcggtattatattgtgatatggccgaagtagaagatatctctaacaaagtttctcgttttcattatgtgaaacgcgtggaaatgtctttccgtccgttcttaaaaacagaatacgaatccaaaaaagaaatgatgtacgaacataaaaacgaagatgtgcaaatcagtatttaatcaaaacggcgagactatttcaactagtcttgctgtttttttgcacctatttatgataaagtaaaaaagacattgaagtaaaggttgtgcaaaaacatgagagtcattgcaggagaacgaaaaggacacgctttaaaagctgttccaggaaacaatacaagaccaacgacagataaagtaaaagaatccttattttcgattatcggtccattttttgatggcgatattgttctcgatttatttgccggaagtggcggacttggaatcgaagcactgagtcgaggtgcggagcgcgcagtttttattgaccaagcgacactagcaattaaaacaatccgtcaaaatattgaaggttgccatttcacagagcgcgcagaagtataccgaaatgacgccgaacgagcactcaaattgcttcataaaaacgagtggaaatttgaccttgtatttttagatccgccctataaaaaacaacaactagaaaaattacttatagccttagaaaaattagagctagttagtgaaaatggaagaattgtttgcgagcatgataaagaagcagtgatgccagatacaattggtaaatttgagaaaatcaaatcggtttcttacggaattactgttttatccatatttgaatttcaggaggcgtagaaatgggaaacaaaattgctgttattcccggaacatttgatccaattacaaatggacatttagatattattgaacgtgcagcgaaaatattcgatgtactttacgtatccgttttaaataattcgtctaaaaaaccactttttaccgtggaagaacgaatggaaatgattaaacaagtaaccgctcatttaccaaatgttcatgtggaaagtgcaagtggattaacagttgattatgctgctaaacgcggggctactgctattgtcagaggactcagagcagttagtgattttgagtatgagatgcaaatagcttcgatgaaccgcacacttaatgcagacattgaaactttttttgttatgactaatacgaaatactcgtttttaagttcaagtatggtaaaagaagtggctcagtatcaaggtgatattcgtgaacttgtacctgaagtcgtaaacaaagcggtaaaagcaaaattcaataagtaggagatggacagataatgcgtaaagagtggaaaaaaataacggcgatagtgctgttaatcattattatagcgggcttttttattccggttccgtattatatttcaaaacctggtggaacggaagaacttgcaccactcgttacggtagatgaccatccaaataaaaaagacggttcactcagcctagttacgattgcaatgggaaaagctaatatttatacatatatgacagctaaattcctgccatatcatgaattagaaaaagacagtgacattaaatacgacaacgaaactgatgaagaatacaacgttcgccaaatgcaaatgatgaacgaatcaaaaaacaatgccatccaagtcgcatataaagcagcggaccaaaaagtcaaagttacttatgatggtgtatacgtattaagtgtaaaagaggacgtcccagcagccggtatccttcatgcgggagatttaattactgaaattgacggacaatcttttaaatcaagccaagaatttattgactacatccacagcaaaaaagtgggtgacactgtcaaaatcaaatacaaacatggcaataaaaatgaagaagcaagtattaaactaacagctatcgataaaaaaggcacgccaggaattggtatcacactagtggatgatgaaaaaatcactgcagacccaactgtgaaaatcgactctgaaaaaatcggcggaccatctgctggtttaatgtttagtctagaaatttacagtcgcttccaaaaaaatgatttaacagatggcaaaaaaatcgctggaactggaacgattgatcctgatggaactgtaggaagaattggtggaattgaccaaaaagttgtcgcagcagataaaagtggcgcgaaaatcttctttgctccgaaagatccaattacaaaagaaatgaaaaaaagcgatccaagcattgaaagcaattacgatacagcagttaaaacagcgaaagacattgactctaaaatgaaaattgtcccagtgaaaacattccaagatgctgttgattatttagaaaaactacaataaaaaaagccgttttgtctgagtatagacaaaacggcttttttcatattaaagatatttcgcagttaacgattgtttgttttttaataaatcgagtggcgcgccttcaaatagaatttgcccacctgaacttccgccttctggaccaaggtcgataatccagtcagcatttcgaataatatcaacattatgttcaatcacaatcaccgtatttcccttatttacaagagagtgaataatagacagaatgtgttcaatgtctgacatatgaagcccagttgttggttcatccataatgtaaatggatccttttttatggagctcattggcaagttttaagcgttggcattctccgccagaaagtgtgctaagtgcttggcccagtgtaacatagccaattccaacttcttccattgccgtaattttcttcaagatttttttatctgtaaagaattcaagggcttctgaaacggttaattctaatacatcactaatcgattttccatcaagcttatactgtaaaacggaatcttggaatcgtttgccatgacagacttcgcaaggtgtacgaatcgagtccataaaagctaaatccattgttgtaaagccaagtcccttacagttttcgcaggcacctttcgaattataactaaatagtgaagggctcacatcattttcttttccgaatgcttttctgattggatccataatgcccgtatatgttgctggattggagcggatattcgcatgagcagcggactggtcaataacaatggcatctggatattcttttaggaaaacagaatgaattaatgtactcttcccagagcctgccacaccagttatcactgtaagtacttcttttggaatagtagcttgaatatcttttaagttaaaacgactgcttttttcagtagataaaaagccttttggtgcccgcggtttatcattaattggcaagtggcgattgaggaaccggcctgttaaagtatccgacttgagtaaatctgggtaacttccaacgaactgaatctcaccgccatgttttccagcgtgaggacctacgtcgacaatatgatcggcaattttgattacatccggatcatgttcgacgacgagaatcgtatttcctttatcacgtaatttaacgagtaagtcatttaaacgatgaacatcacgaggatggagcccaatacttggttcatcgaaaatgtaaagcaaatcagttaagctactgtttaaatgacgaatcatcttgacgcgttgtgactccccgccagaaagagaagctgtttgccggtctagtgtcatataaccaagaccaatatcaattaaatgttgcacccgttctgttacacttttgaccatcggagctgctacttggtcttttatgctagtaagtgtttctttgagttcatctaactgcatcgcggtatagtcagcaatattcgcgccgtttattttacaagatagtgcttctttcgaaagtctcgtaccttcgcaagttgtgcacggggcaatatgagtgaatttatctattagttttttagtagaagcagacatttcgctttctttttgaatgtaaagccgattgaatttagggattaagccctcgtatgttgcgttcatgctacccattggtgtttctaaaaagactttcacatctttcccgtttaaaagcatgttgtattcttcttcggtataatcttttatttttttgttcacatcaaaaaagccagaataagcataggaattccagtaccatgagtctactgaaaacgtcggaaataagatggcgccttctttaagtgatttatttggatcgagtaatttgactagatcaacggatactttttgaccaacaccatggcagtcagggcacatgccagcaggatcattaaatgaaaatagatttgctgtaccgatactaggttttccaacgcgcgagaaaagtaagcgcaaaatggaattaatatctgtgatggtacctagagtggagcgggaattaccgccaagtcgtttttgatcaatgataacagaggtggagaggttctcaattgaatctgcgtccggttgcgtatacttcggtagaaaattacgaagataagcgctgtatgtttcgtttagctgtctttgcgattctgtggcaatagtttcaaatacaatagaagattttccagagccagatacgcctgtaaaaatagtgatttttcgttttggtatatctagggaaatgttccggagattgttttcacgagctcctcttaatcgaatatattcttgtaccatacacatacctcctgttttttgagtcggacaaacatcttagcaaaatagaacgatgaaagtcaaccaaaaaccttgtaaagttttacaaggttagaattggtggagtatgaaagtcgcccgcttgataatcttctaatccatttattagcgtataaatgtctgtcgcccgtaaatcttcttttaaaagacttggttctgctttagaaacagtcgtaacaataggcagcgaaatattttttttatggagcgataaatatttttgaccagttttactcattccaagtactcggatgtagggctctgctggaggcgtattttgggcatttaataaaatttgtaacgccgttcgttgtaatcgtgcgttgctgtaacgttttgttttcattatttcaataaaatctgaaaaactatgcgctttttttgccgcaagttgcattcgattttgaattccttcactaaccccgcgaatcccttcaagctcatccgaactagcttggattaaacgaaactttagaagtggccaataatcttcaaacgataaaaatggtccgcgataattatttaaaacttctatagaggaatcgggaaggtagcgactagcttcttctaaattcccagcaaggagtaactttcgaatcgcagttgcactagcaatataatcatggcttgcttccgcatcgtgatagcccgaatgttcacgtggcatcgtttgaagtgcaatcgaaggattttgtttttgaatagcgagtgcgtagtggaaaccgagaatgttattaggcttagtgacatctaataattcttttccaaataagtgcgtaaaagcgtctgtataagctctcgcatacgatgttttcttatcacctaaagcaagctgaatggtttcattaaaagcggcttcattttcaacaacggttttagcagcggtagaaaaatcttcactaaccccgtgctcacttccgaaaaaaagtgtatctatatgaagtgcatctaatagtcgaatagactcttccgcaaaaatagtcgcatgttgtgtcgcaaacgaaacagggagctcgataaccatatcgacgccagctgcaagggccatttttgttcgttcccatttaggtataattgctggctcgccgcgctgtacaaaagaaccactcattaccgcaattaccacatcgctttttgtaagttcacgtgccttatttaaatgtaactggtggccattatgaaaagggttatattcgaccacaattccagttgctttcatttcggttccctcctttagataatctattttagcataaaattcagccgctagtttcggtccctgaaaaaccattgacaaaagcctttaaaaaagctataatattttgtgttgcgcttggagtgatgtaggatgaaatggtctatcagtcaattgaaaaaatatcgtgacagcaacttcacgattaatgaaaaagctgacctaaaaaagttctttcaagagaacaatatagacgttcgtgatgcaagccccgtacaagtaactggggaactaattgtacacccagaagaagttaccgctaaccttacaatgaaaggcgagtggacacttccatgtgctcgtacacttgaggatgttatttatccttatgaagtgcatgcgacggaaacctttgtgaaatccaaagaacaagttctagatgaatcttggcatgtgatggaacaggatatggtcgatttaacccctgtagtagaagaacttttactagttgaaattccgatgcaagttttcagtgaagacgcactcgaaatgagtaagcttccacgaggcaaagaatgggaaatgaaaacagaagaaggtaacctactagaacaaatagcaaaagaaccaaaagtggatcctcgtcttgcgggattagccgattttttcgataagaaaaaagaagactaaacttccccgtgaagctggaatatattaaggaatttatttttcttagattaacgatacaagtacttagttatcgtcaaggaggtgtaaggaaatggcagtaccttttagaagaacttcaaaagccaaaaagcgtaagcgtcgtacacacgttaaacttcaacttccgggcatgaacgaatgctcgaattgcggcgaatacagactttcccatcacgtatgtccagaatgtggacaatatgatggcaaagatgtagcaaacagctaatattgttaaaaacaagtgacgtttcacttgttgaagacgaacctcgaaagacgccatgggtctttcgaggtttttgtttgcgcgcaaaagtgcaaagactcgccacttctgataaaataaaagcatcaaccaatatggagctgaaaatcaatggaaaaccaaataaatgttgggattattggcgcgggagcaatgggactgttatacgcagctaatttcgctgataaatctaagctcaccctttttacacatcgaaaagaacaagcggatttattaaatcaaaaaggaatttcattaatagacaatgaaacaacaaaaaatatacatattcatgcagcacagattaccgaagaagaacagttaactaaacaacagttactaattatcgctgtaaagcagtattccttaaatgaaataataccaatacttcaaaaactaccgacaaaaatcccgattttattcattcaaaatggtgcaggacatctagaacgcttaagtgagcttgggacaacacgcacgattttattaggcattagtgagcacggggcaggtcgcgaggatgatacgaccgttatttggcgcggacacggccgaacaaaatatagcattttccaaggagaactgaatgacgacctaaaagaattactaacgtctagcccagcttttccgattgaaaaacatgcgaattatcaagcgattatccaagaaaaattatttataaatgcagtgattaaccctttaacagcggtacttggtgttcaaaatgggaaacttttagaaaatcaagaatggcatcgtttgttaataagggtagtaaatgaagttgaaactgtcttaccgatagaaaatgcattagagaaagtcgagacgatttgccgaacgactgcgcttaacttttcttcgatggcacttgactgtatgaatgaacggatgacagaaattgatgggattgtgctaccaattttagaaaaaggggacaaaacagaaacttcccttcctacacttcggacactttaccagattattaaaggattggaaggagaacgtcatgtttgattggttaactaattcaactgctattattattattttacccgtagtggtatttgtacttactttgtttttagcgcgttttaaatttcggaaaccgcaacggagaattatgttggcagcggatttatcgacaattttcttaattatcgcggtacacttttttatgattgttatctttaaccgttcgtttttactttatattttgttgtttttatttatcttaggcatcgttattgtggtgttagctgcaaaaaaagaaggcgagattcagtttcgcaaaatccttcgtggttactggagactttgtttcttcatcttcgccttactatatgtcgttctttatttatatggcattatttatagtttgattttacttttttaagcggttttgtttcaatccatactttacttaaatcaaagtagccatatggattttctgcaataccttttatcatggaatggagcgattggcttttttctggatgatgtaaataaattaaatagttattttcggttagataacgatcgatattcgtttgcaaagcgtctcttttggaggcgcttttttctaatttcattgcatctaattttttcgaaagttcgaggagaatacttggattaagtagctgttgtggtaaaaggtaagggttatttaagaaatccaaataagccatctcgttatcagaagctggaatttctcccatcatcatcaagtccgtttcctcttttggtacatttgaataagaagcttcatgatgagttatgattttttgctcaagcgtaattccgaattgtgctgcccggtcgcggatccatttcgattcttttaaagcggtaggatgctgtgttgtcgcaaaaataactttttctccttggtaatttgcttcttttaataagtcggcaattttgtcagggtttttaatgggagcaatcgatttttctggaaagtaattcgaagcgattgtgccgtaattttcgaaaccttgctcactagctatttggcagtctattagttgataaattgcttcgcgaaaagctggatgttgcgggacgccttgccgatgggtattaaagcaaataaagttgacaccgacacctagtttgcgacgttcaacataagctttattttcctcgtaatcaacggaagtaaactgcatcggaatgtttgttaaagtgtctccggtttgagctgtccaaaattctactcggtcaagaagagggcgctctaaaaaataagcgtcaaatgcttctaaaactagacgttcatcatttcgctctactatccgaaaaggccccgttgaaatccatttgtattcatcgaaaaccacgtcgcgtggcaaaatcgccatattggcagtacataaatagcgaataaaaaaaggatctggcttgtttaaataaatcgtaatggtaaatttatttccacattgaattgttttaattgattttagttgccaggcgcttaccgaatttgtttccttcgaacggagcaaggtgtatttaacgtcctcgctatcaagcatacgcccatgatgaaataaaacactttttcgtaaataaaaagtccattctgtgtaatcatcggaaactttccaattatgggcaatatggggaatgatagtctttttttgttcatcatattttacaagagtatcactgatttgtgtaattaaaaaagcttccattgaaacagaggtttgcaacggatcaagcgtagtaagtttgcgccggacaatagagcggagtatttcttgctgattttctgttacttgtaaaccaaacatgtgctgaatttcggtagatatgctcgaaaaccaactttttggtattggtaattgtagtagaaataatatatcgctaaatgcatcttttgctaaactttgctccaaaacttccagaacttcatcttctaattgtttcgaaaaaataagccgtgaaacatttccgcgaccaagccccggtaaataagtgagcatgtcctttgattggtattgctgcaattttcgcttggcatttttagtagtacaaaaccaaatatctgctaaattatttagtttaaaaggtacttctaaatctgtagtttgttcatataaatgcgcgcgcatagtgaaataatctttgtccatgagccagctccaatctaaaaggggacaatttatgtttttaaataccctttttatctttctgtttcccttttatactaacagagaagtcagaaaaattgcaatggaggggattccatgtttaaagagttacatccaaatattcgtgcgcggatattgattcaatttttaagtaaaataatcgggtcaatgatttttccttttatggcaatttatttttcaatggaaattaatagtaaggtcgcgggaattctcttgatgattaacgtattggcgcagtttcttgcgggtatgtatggcgggcatttggcggatattattggtcgtaaaaaactgatggtggcaggggaacttcttaaagtatttgcctttctaggaatggtgctttgtaattcgccggttttccattcaccatggataacgtttgtgatgctacttcttattggtgtggcgcaaggactcataaatcctgctggagaagcgatgttgattgatgtaagtacgccggaaaatcgttcttttatgtattcggttagttactgggcaaataatttatctatgatgatagggattattgtaggtggttggtttttcatcgattacttatttccgttactcgttgcgctcttcattatgtcattcgtcactgcatggcttactataagcttgatttcagaaaccttaaagcaaaaagcagtattaaaaaaaggatcttacgggttagtaggaatgcttaaaaattatgggcaagtgttacatgattgccgttttcttctatatactcttggtggaattgcagttatgtcgattgaatttcaacggagcaattatatttccgtacgtttagctgaagattttcaggctttgctcgttcatttcggtccactcggaaacattacactaaatggcgtacaaatagtcagcgttttaacggcagtgaatactttgtttatcgttcttttcacagttccggttgcaaggttcgtaacaaaaagagcgcaacaacctattatgtacgttgggtttactttatttgctataggttttgcggtgtgtgcctttgcaaataatctggcagttttattattagccacggcagtcctttctattggagagttactttacgtgcctacgcgccaaacgattttagccgcaattgtggacgataacagacgcggggcatatatggcgtttaacggtattattttccaaattggtaaaatgattggttcggtgagccttgtatttgcaccttttattggcaaatatggtatggcgacttttacgattttacttggggttctaagtattgttttttccgcggctgcattaaaatcgggctggaaaaaagtattagcaaaatagtttttgggtgagaagtggggaatccctccacccggccccacaatcatttttaaaaaggaattgtagttaaaatggctttaaacaagggtttaatcattctgcttaaatagtagaatgatttttttttacacttttttaggttttgggtggtgcgaagtggggagatgtggtaaagtggtatttaggaaagtgggtgaagtctaatgttcatgggagaatatcaacataacatcgatataaagggcagattaattgtgccagctaaattccgtgagcttttgggggataattttgttataacccgaggacttgataagtgtttatttgcttatccacaagaggaatggaaaaagcttgaagaaaagctccaaaccttaccacttactaaaaaagatgctcgttcctttacacgtttcttcttttccggtgcgtctgaatgcgaactagacaaacaaggccggataaacattccatccaacttactacagtatgcggatttggaaaaagaaacagtaattatcggggtttcaagtcgtattgaaatttggagtaaatcagagtgggataatgtctttaacgaggcagaagagtcctttgctgatttagctgaaaatatgattggctttgatatttaagggggaatttgcatgtttaagcacgaaaccgtattactacatgaaacagtcgatatgcttgaagtaaaaccagacggaatctatgtcgatgcaacacttggcggcgcaggtcactcagagtatttactaaataagcttaatgaacaagggcacttatttgcttttgaccaagatcaaacagcaattgataatgcaaaaattaaactagcagaatatagcgatagagtaacttttattaaatcaaatttccgctatatgaaagaagctttgaacgagcgcggaattgaagcggttgatgggattttatatgatttaggtgtttcttcccctcaattagacgaaagagaacgcggctttagttatcaccaagatgcagcacttgatatgcgtatggatcaagagcaagaactgacggcgaaaaaagttgttaacgaatggtcttaccaagacttgattcgcatctttttccaatacggcgaagaaaaattctctaaacaaattgctcgtgaaatcgaacgtcgtcgtgaagtaaaacctattgaaacaaccggcgaactagtagacatcatcaaaacagctatcccggcgccagcaagaagaaaaggcggacatccagggaaacgtacttttcaagcaatccgaattgccgttaacgatgaacttggcgcggtagaagattctcttgaaaatgccttaacattattaaaaccaggcggcagaattagcgtaatcacgtttcattcattagaagaccgcataacaaaatacttattccaagaagcgacaaaaggaccagatttaccaccaggtcttccagtcattccagatgaatataaaccagatttcaaacttgctacaagaaagccaatcgtaccaagtgaagaggaactggaacaaaacaaccgagcacgttctgcaaaattacgtgtaatcgaaaaaattattaaatagcaggagttgaaaaaatgtgagcaatgtcgcctataaatcaaatctcgagccaaatagagtacatagagaagcagaacagcctaaaaaacaaatcctaaaacgtggtcaaatgacacttggagaaaaagtaatcatcacgattgcgcttgcgattgttttagttgttgcttttcgaatcatcagtgtacaagctcaaatttatacagtgaaccaagaaattcaaacaaaagaaacaaaaattctcgaacaacaaaaatcaaatgaagacttaaaagtagaagtaaaagatttaggaagatatgaacgtattttgaaaatcgctaaagaaaaagggttaaaacttgatggcgataatgtgaaagtggtagatggtcaatgaaacggcgtataggtaacatgagaaggggagctttagtgctttttatctttttcactattctctttctcttagtttctggccgttttctttatttgcaaattacgggagaagcaaatggggttccgctagcagctaaagcatctaaacaacatttgaaaagcagtgttctcgaagcaaaacgcggctccattttagatcgaaaaggagaagtgttagcagaggatacggcttcttacacgattgcagcggtagttagtgataaattatccaaaacaacgaaaaatccgatgcgagtagttgatgaagaaaaaacagctcgtattcttgcaaaatatattcctatggacgaatctgatattctagataaactcaatgaaaaaggtaaataccaagttgaatttggctctgcgggaaaaaatatttctacagaaacaaaagctaaaatcgacaaagaaaatttaccaggcattgaatttactcgtcaatcagaacgtttctatcctaatggtactttcgcgacacaattaatcggctttgcgcaacaagaagaagaaaaaaacactaccaaattagaaggtaaaatgggaattgaatccagctataatgatatactaacaggcaaaaatgggaaaatcgattatagcaccgaccgaatgggctatattttgcctgattcaaaaaacaaagtaacagaagcaaaagacggtaaggatattaccttaacattggataaaaaaatccaaacctttttagaagatacaatgacaactgtcgatgcaaaatataaaccgaaaaatatgatggccgtagttgcagatccgaaaacaggagagattttggcaattagtcaacgtccttcatttaatccagctgacaggtcgacaattactggaaacagttcaagcatttggcaagatttaccagtggaatatgcttatgaaccaggttccgtaatgaaaattatctctttagcatctgctattgataaaaacgtttataatccaaacgaatactatcaatcaggttcctataaagttggcgatatcgcaattcatgaccataataatgggaatggatggggcttgattccataccgcgaaggcgtagaacgttctagtaacgttgcgttcgctaaactcctaaacaaaatgggtactgatacatttaaaacctatttagataaatttggttttggcaagaaaacaggcattgctttaccaaatgaaacaaaaggaaaaattctttataactacccgattgaaaaagtaacgactgtcttcggtcaaggtacaacagtttcgatgatgcaaatgattcaagccgcatctgctattgcaagtgacggcacgatgaaagagccttatgtggtttcaagcgtcaaagatacgaatactggagaagagacagaaacaaaaaccaaaatcgctggaaaaccaatcagcgccgaaacagctaagaaaactcgagatgaactaaaaaatgttattagcggtcgaaacggaacaggtaaactatatgcgattcctggttatgatgtagctggtaaaacaggaacatcacaaattccagattcaaaaacaggtaagtacatgactggggcagaaaattatattttttctttcttaggaatggcacctgctgataatcccgaactcgtgatatatgtgactatgcaacaaccgcaactatctggtagccaaacaggtggggaagcagtttccgaagtatttaatcctgtaatgaaaaacagcttacaatacatgaacattaaaccgggcgatgttgaaaaactagctagtgaaaaagttcctgttgtagctgaaaaaacagtagacgaagctaaaaaagctgtacaagacaaagggcttgaaccagtagttgttggtaatggcaaaaaaattgttcaacaacttccgctagcaaatagcgaaattatgcaaggacaaaaagtaattctgatgactgatggagatatgactgctccagatatggtgaattggtcgaaagttgacgcgctaaaagtctcagaaatcactggtattccttttgagtttagtggaaatggttatgtgaaaagtcaaagcgtttcggcaggtagcgtaatcaatagtgaaacgaaaatggaaataacactcgcctcgccagaacaaattggtgatttcaaccaaaatcatgaccaagatacagcggagcaaaataaaaaagcgacagacatccgagaaaatgcaggtataggtgatttattgaatgaataataggaagatagaagtatgtcagctgagtaaagtggcatacttctaactttaaaagcaatctatgtctttagtcgtggtagatatactttgttgtttttgctaagatagaaaaggattctttttgattttagcaaaactaacagaaagaataagtttgaggagatggcaagaatgaagttaaaagaactaatgcaagctatcccggtctatactggagaagcaagtgcagcaattgaagttaaccaaattgcgcaagatagtagaaaagtacaaccaggtaccttatttatttgtatagatggagaaatagtggacggacatcagtttgctgaccgtgccgttcagcttggtgcagtagcaattatcgctgaaaaacaattagatgtttccgtgccagttctttatgttagagattctaaacgagcaatggcaatgctagcggattacttttatggttctccaacccaagcgttaaaactagttgggattacagggacaaatggtaaaacaaccgttagccatttagtagaacaaattgttcgcgaaaacggcgagcaaactggcttgattggtacgatgtatcgtaaaattggcgatgaaattttagaaacaaaaaatacgacgccagacagtctaaccttgcaagaaacttttcgcgatatgcttctgagtggtgtgagtacagcagtaatggaagtctcttctcacgcattagttcaaggccgcgtatacggttcagattatgacgtagcagtatttatgaatttatctcaagatcatttagattatcaccatacaatggaagaatatgcttacgctaagagcttgttgttcgcgcagcttggtaacagttataacttgagtaatccaaaaattgctgttttaaatgcagatgataaagaaagcgttcgaatgcaaacagcaacagccgcgcacattataacttttgggataaaagaaccggctgattttagcgcatctaacatccaaattacaagtcatggctcaacttttgatttaaaaacaccagtgggagatttcgcattaaaaataaaaatgattggaaatttcagcgtatataatgtattagccgcgattgctacaagttttgcgctacgtattccagttataaatgcaattgcaacggttgagagcattccaggggtaaaaggacgttttgagcttgtaaatgcaggacaagattttccagtaatagtggattattctcatacacctgacagcttgttaaatgttctacaaacgattgatgaatttgccgaaaaacgtgtctttgttgtcgtaggatgtggtggtgaccgtgataaaggaaaacgaccacaaatggcaaaaattgctgttgactatgcgacaaatccaatttttacatcagataatccgcgtagtgaagacccacatgcgattattgaagatatgattcaaggtgttccagggagcgattcatacgttgttcatgagaaccgtcgcgatgccattcgttatgcagtaaatatggcagaagcaggggatgtcattctgattgctggtaaagggcatgaagattatcaagtgattggtgatgaggttattgatttcgatgatcgcgtagaagctcgaatagctattgaaaaaaaactcggactcgcataaaatatgaagtgaagtgctttgacaaacagattggggagaatttattgtgtctttatacatgttagtatcaacttttgcagtggcttttatcattacggtgataggtgtcccactatttatacctttcttggtgaaattaaaattcggccaaagtattcgggatgaaggcccgaaaatgcacgaaaagaaatcaggaacaccaactatgggtgcggttatttttattactgccatgctcattagctttttgattttttcattcatcagtggtgaagttagtgcggctacttggctactattcattacgctggcattatttggcgcattaggttttctggacgactatatcaaagtagttcaaaaacgtaacttaggtctcacttcgaagcagaagtttttaggtcaagttgcgatttcgattttattctatcttgtgtatcattttagtgattttgcagaaacgcttaagattccatttacgaatacggaaattgatcttggttggttcttcattatctttatcttgttctggttagttggtttctccaatgcagttaatttaacagatggtttagacggacttgtttctggtctatctgttattgcattctctgcttttggtgtgattgctttttaccaagaacaaatggacgtagcgattttctgtttcgcaattgtaggcggaatgcttggatttcttctatttaataaaaatccagcgaaaattttcatgggagatactggttcgcttgctctagtggaagtatcgcagctgtttcgattttagttcatcaagaatggttggtacttttaatccggattattttcgttattgaaactgcatctgtaattttacaagtattttactttaaggcaacgggaggaaaacgaattttccgtatgacaccaattcatcatcatttcgaacttggtggttggtccgagtggcgtgttgttttaacgttctggggaatcggattaatcggagcaattatttcagtctgtgttgttatcttttaaataaagcgccgtaatttttgcggcaaaagcgtctctagttggctgttttttacagaatctggttggcgctttccgtcgtttttgtgaatctcatagaatcgaccgccaattttgatataaatgggggaaccaaaggaaatgaaaaaaattgaaatgtaccatcacaaaaaagtgcttgttttaggtcttgcaagaagtggtgttagcgcggcaacaattatgcataaattaggagcattcgtcacagtaaacgatcaaaaaccttttagtgaaaatccagaagcacaaggattacttgaacaagggattaaagttatttgtggatcgcatccgattgaattattagatgaaggatttgaactcgtaattaaaaacccggggatcccgtataacaacccgatgattgaaaaagctttaaaactcaaaattccagttattacagaagtagagttagcttaccaaatttctgaagcgccgatagttggtattactggaactaacgggaaaactactacaacaacgattattcaccatatgttaaatgcacacaaagaaaatagctctttgcttgcaggaaacatcggttttccggcatcagctgttgcagaaaacgcaacaagcgatcaatatatttcgatggaattatcttccttccaattaatgggtgtacaaacatttaagccacatatttctgtaattacaaatatctatgaagcgcatctagactaccatacagaccgcagtgaatatgtacaagcaaaatggcacattcaacaaaatcaaacagcagacgatttcttagtaattaattgggatcaagaagaattgaagaatttaactaaacaaacaaaagcacaagttattcctttctcaacaacgcagcgtttagaacaaggaagctacgtccaaaatggcaatattatgtttgacgatgaagtaatcggatcacgtgatagcattttacttccgggagaacataatttagaaaacattttagcatctgtagcagtagccaaaactttaggtgtgacaaatgaagaaattatgtatgtccttgaaacatttaaaggcgtcgagcaccgaactcaatttgtagtggaatggcaaggacgtaaattttataacgattctaaagcaactaatattttagcaactcaaagcgcattgaaaggttttaaaaatccagtagtattacttgctggaggactggaccgtggaaactcgttcgacgaattgctaccatttttcaaaaatgtgaaatcacttattgttttcggtgaaacggcagataaaattggtcgagtaggaaaaattgcaggaattgaagtgcattatgtggatgatgtagaggcagctgttccggttgcatatcgcgagtcagcaccaggagatataatcttactttcaccggcttgtgcaagttgggatcaataccggacattcgaagttcgcggaaatgcctacatggacgcaatcagtgaactaatagaagaggtggaaaaatgaaagtagcaataagcggtggtggtactggaggtcacgtttatccagcacttgctttcatccgagaattaaaaaaagtacatccagaagcggaatttttatacattggaacagaaaaaggcttagaagcaggaatcgttaaacgagaaggtattccttttgaatcaatagaaattaccgggtttaaacgttcattatctcttgaaaatatcaaaacagtcatgcgttttctaagtggagctaaaaaaagcaaacaaattctacgcgaatttaaaccagatgtcgtaattggaactgggggttatgtttgcggtcctgtggtttatgcagccgctaaacttaaaataccaactttaatccatgaacagaatagtattgctggtttaacaaataaatttttaagccgttacacagataaagtcgcgatttgttttgaagaagtaagtgattcgtttgcttctgagaaaattgttttcactggaaatccacgagcttcagaagtagttggtgtggacggtgaaggcgcactagaagcatatggtttagtttcaggaaaacctactgtgcttgtttttggaggtagtagaggtgctcgaggtataaatgaagctgtggaagcaatcttgccggaatggaataaacgagattttcaattgttgtatgtgacaggtgatgtccattttgaaaagataaaagattctttaggagagatgaatttagggaatcatattagtgttcaaccatttatttatgatatgcctaagattttaaatgctgtgacacttgttgtttcaagagcaggagcgactacattagctgaacttacagcgcttggggtgccaagtattttaatacctagcccttatgtgaccgcgaatcatcaagaatataatgcacgcgcgttagaaaaaaataatgcggctgtggttattaccgagtctgaattaaaagagacggatttaatggcgacagtagatgcgattttaacagatgaagcaaaattaaatagtatgaaattaagtgctaaacaaatggggcgcccagatgcagctctaaaactggtagaaacagtccttagtattatgaaataaattgcagaagggggcgaataaaatggctgaaaacaaacgagtagtttccatcgaaaaccgtatacctgaattaaaaaaataccgcaaaaaaaagttaataagacatttagccattttaatcggaatttttgcgattttaatcttaattacactttatttcctttccccattgagcaagttagataaaattgctgtaagtggaaataaacaactaactgaaaatgaagttcgtaaagaaagcgggcttactgccggtgaatttgtccttggaataagaaacggaaaaaccgaagaaaagctcgagaaaaatacgttaataaaaaacgcaaccgtttctaaagatggcctaaatgatgtgaaaattaacattacagaatataaaacgattggttaccaacaaaatgacggtaaatactatgatgtccttgaaaatggcattatgctaacagaccaaccaagacaatttccaatagggaacgacttactgttccagaattttaaaaatggtaaaacgctcgaaaaaatggtagcgcaaattaataaactaccaaaagatgtagtgaattctatttccgaagtgatttatagtcctacgaagaccgatcaaaatcatattgaattatatatgaatgatggtaatcaagtttcagcggatataagtagttttgcagataagatgcagcattatccagcaattgtcgctcaactagcgaaaggacaaaaaggcgtgattgatattgaagtaggttcttatttccaaagttattatcaacaaaacgccgaaaaaaaagctgccgaagaaaaagccgcggagaagaaaaaagaaaacgaataaagacttgtttcttctctcgcatttttggcgaactagcacttaacagatatgtcaaaaaggtgacaaaatgatgacctgcaagcttgcgataccaacacttgttcgctttttgaataaaatgaaaaaaatatcttaagaatttgccaaaaattgttctttgtgcttttattaccttctttcttagtgtagactgtaaataagtgattttgtatgttaggcagaatggggaatcattctacactgacgccatataaataaagaagtaacaccgctttttcaagcaagttaaaaaaaccggctttgctcggtataaaaaatgaaatattatactttaaatgactagaataaaaggaggtgccgataaatgggtgatagcgaaatttatgtaagtttggacattggaacagcttctgtgaaagtaatcatcgcggaaatggctgacgatagactcaatattatcggtgttgggaatgtcgagtcatccggaattaaaaaagggattattatcgacatagacaagactgtagaatccattaaaaaggcaattgaacaagcagaaagaatggttggcgttgaaatttctcaagtaatcgttggggtagtatcgagtcaggtacatttagaagcttgccgaggaattgtggcagtaggtagcgaaaaccgggaaattacagatgaagatgtctggaatgtgatggatgccgctcaagtcgttcctctatctcctgaacgagaaattattaatactattcctgatcaatttgttgtggatggtttaactgggattaccgatccacgtggaatgattggtgttcgtttagaaatggaaggcacactaatcactggctcaaaaacaattttacataataccgtaccttgtgtgggaactgctgggctatagatatctgagatttggttacaacaccacttgctgaggcatctatctctttatctgaagccgataaagaattcggtactgctcttgtgaatattggtgcaggaacgacaactgttagcgtgtttgagcaaggaaggttaacttacactggtgttattccagtgggtggagataatatcaccaaagacttatcacttggactaaatacatctacagccaatgcagatcgtgttaaattagagcacggttacgcattttatgatgatgcttctccggatgaagtttttgcaattgatgttatcggtagtgaccaaaaacaacattttacacaagtagaagtagcggatattatcgaagctcgtatggaagaaattttccaattagttgtagaagaattgaatcgcgtaggtaaaacgcatcttccaggaggctacgtattaactggtggctcaatggcaattccaggagctattgatttagcagggaaaacattggcagcacatgttagactggcaattcctgattatatcggtgttcgcgaaccatccttcacaacagcggtaggcttgataaaatatgcataccaaatggctgaattagaaggtcgcgatgtaagcagcaccgcaagtgagcctcgttatgatgacgaagcaccaaaacaacctaaacaaaaaccaaaaaaatcagatgacgaaaaagtatcaacaaaaatgaagaattttttcggcgcattttttgaataaaagcgaatagctggtaaggcagcaagaaaaacaaattgtataaatcggcaaataggaggcaataatatgttagaatttgacactagttcagaaagtttggcaacaattaaagtaatcggtgttggcggcggcggtaacaacgctgtaaaccgtatgattgagcatggtgttcaaggagtagaatttatctccgttaatacagacgctcaagcacttaatttagcaaaagcagaaacaaaattacaaatcggtacaaaattaacgcgtggtttaggcgcgggtgctgtacctgaaattggtaaaaaagcagcagaagaaagtcgcgaacaaattgaagaagctttaaaaggctctgatatggtattcgtaactgctgggatgggcggcggaactggaactggtgctgcacctgttatcgctcaaatcgcaaaagaaatgggcgctctaactgtcggtgttgttacacgaccatttggttttgaaggaccaaaacgtacgaaacaagccctaactggaacagaagcaatgaaagaagcggtggatactttaattgttatccctaacgaccgtttacttcaaattgttgataaaaatacgccaatgcttgaagctttccgtgaagcagataatgttttacgtcaaggggtacaagggatttctgatttgattgccgttcctggtttaattaacttagactttgccgatgtaaaaacaattatgactaatcgtggttctgcacttatgggtatcgggattgcaactggtgaaaaccgtgccgcagaagctgccaaaaaagccatttcttcgccacttcttgaaacttccgttgatggagctaaaggcgttctaatgaacattactggtggatctaaccttagtctttatgaagtacaagaagcagcagaaatcgtttctagcgcttctgatgaagatgtaaacatgatcttcggttctgttattaacgatgaattaaaagatgaattgattgtaactgttattgcaacaggttttgatgaagaaaaacaagcgcaacaacaagcgcaagcgaatcgtcgtcctaaccaatccattcaagtgaatcgtccaagctatgctgtgcaagatgagccgcaaaatgattacgcgcaaaatgcaccgcaacaaggaaataatccggtacacgaacaaccacaagctgaaccacaacaaaacagttcagacgttgacgtaccagcatttatccgtaatcgtaaccgtcgcggataatacttataacacaatttcacccggccactgttaatgcgtgattaagtgaccgggtatctgattataacaagaagcgttttaaatgaagcacttcgggaattatataaggtgattaaacaaatgacaaaacaagctaatttagaaaaagtaactgcacaaataaaacaatcttgtgaaaaaagcaatcgtcaacaggcagacgtaactttagtagctgttacaaaaacaattgatgtagctggaatcacagaactttatgatttaggaattcgtcactttggtgaaaatcgggcagatgtatttctagacaaaactagagaacttgcgggtaaagatgacatttgttggcactacatcggctctttacaaacacgtaaagtaaaagatgtgttaccagaaatcgattatttacattcgcttgaccgatcttctcttgcaaaagaaattgaaaagcgagcaacaaaaccaattaaatgtttcttacaagtgaatatttctggggaagaaagtaaacatggcttttcaaaagaagaggcgttgtcgtttttacaagaagcagatttcaattttattgagattattggtttaatgacaatggcacctattacaaatagtgacaaagagctgcatcacgtatttcatgagttaaagcaattgcagcaagaaattcatgcgcttcagttaaaaaatgttccgtgtactgagttatctatggggatgacaaacgactacggaattgcgattacagaaggtgctacatttatacgagtaggaagagctttggtgagtgacgataatatggaggtgtaacaaatgggactatcgaataaatttaagtcattctttttcttagatgaagaggaagaatattatgaagaagaagtagcgagggaaccagaacctatgcaaaagaaaacgaagaaagaaaaacctagtaaaaatcgtttttatgccgttgaagaagaagatgcgaaggtggttagtatgcagggagcacagttttctagtcgtatggtactcgcagaaccgcgagtatatgcagaagcccaagaacttgcggattacttaaaagattataaaacggttgttgtaaacttacaacgcattagccatgaccaagcgacacgtattgttgatttcttaagcggtactgtttatgcgttaggtggagatattcaacgtgttggaaataatattttcttatgtactccagataacgttgaagtaaatggctctatttccgaaatgcttgatgaacaaaactttatgtaatgaattagaggtgtaaactagattgcaaagtattttatatcaagtggtggaagtcattttatttgttattagatggttgccaacactaatgtttatttatttcttgatgagctggtttccaggtgcaagagaatcgaaaatcggtcaatttttagcacgtatttttgaaccgattttagagccttttagaagaattattccgccgattggtatgtttgatatttcgtcccttgtggcttatttcattttccaatatgcgatgagagttttaactggattaattcaagtgtacgttattccaatgctattttaaaaagcacacccgttttctaatgggtgtgctttttttgaataatgaagcaagattagcagagtagcagcttttttcatggtataatagggctaaagactcggaatggattgaaagggagaaaagatgatggatggaatatatcagcattttcgcgcggaagaatacgcatttattgataagatattaggaattacgatgcaagttgaaaatgaatatacaccgcaactaacggattttttggacccgaggcaacgttatattaccgagacagttgttggtggttatgagcatattggcgtccagttttttggtggggttccgcatgcagaacgtcggcgcgcactgatttatcctgattattataccccaacagaagctgattttgaggtggctttgttccatattcgctacccggtgaaattcacgacactcacgcatcaaaaaattctcggtacattaatgtcgcttggaatgaaacgcgatatttttggtgatattttaaataatggtagtgaatggcagttattagtagaaagtacgatgaaggattatttaacattacagcttgaaaaaatcggtaaagtgaatgtgatgttagaagaaactgacttggcaaatgctgtctatgcgccagttgtttgggaagaaatgggcctaactgtttctagtatgcgactcgatgttattattagcaatgcgcaccatatctctaggcaaaaggcgaaacaattagtcaccgcgggccttgtaaaagtaaactggaaaacagtggaaaatccggattttgaatgtgaggaagaagacgtattatcagctcgtggatacggaagagtgaaggtattatcgactggtggtaggacgaaaaaagataaaattcgaattgaaattggttatttaaaataaaaaacgaaagcagttattgctttcgtttcatatgtagtacctagtgtcatatgttgtcaaatggttttatgttatgttattatatatatgaaaagagagccatgcgtgaacatgactctccagtgtaagcccaattaaggtggccactagctaaatagttataagataaccactaacttcgccaaaagtttacaagtggttatttttttttgttattttgactgtttaatagcaacaccagggtcgcaaaagcaactgcaaaagacagtgcttcataaacggtcatgggttatcctttccaggcaaacctaacaaaaatattcataggcatcaccctttcttgttgaaagagctagccaccaccataaacttgcttacctatcatattatagcatgtagaaatagttagtaaaagtacaatcgcaaaaagggtattagtggaatttgagtttatgtgaataatagaatatgattattttatatttaaaaagggagattttgaatgaaaatactaactaaaaatgataacttcaaaacaacataagttacttttgctaatctacaaaatttatttaatttgagtcttacttttgttgagaaaaactgttttataagattaaaataatgtgaaaagtaggtataccaaaaatatacacaaaaccgtcactgtaaatgcacgttttcgatatataattagggtggatattcaaagcttttaaatatcatggagctgaaacgaaagcagccactgctttcgtttttttattagcttaattggagcattctttctaatgcttttaacgcaaatttggttgtatgttcatccactttgatttgatttctttgttcgccgttttgaatagcctcgagtgtccaaagtaaatgaggtaagtcgattcggttcattgtcatacacggacacataaaagggttgagtgagacgatttttttatcgggattttcttgaataatgcgaccaaccaaattggcttctgtgccgaccgcccattcggtgccaggtgctgcgttacttatttctgttacaatttttttcgttgatccagagtcatctgctagtgaaacgacttcatgcgtacattcaggatgaacaataattcgcatgttaggatgatttttacgaatgttttcgatatttttaactgtaaaatgttggtggacggagcagtagcctttccataaaattactttacaatcatctaggttaccgtcatattccagttcgttttttatcggattccaaatggccatatgttctaacggaatgcctagttcaaaagctgtattccgacctagatgctggtctggaagaaagaaaatccgctctttttgctgaagtgcccatgagacaatcttggttgcattactggatgtcactgttgtaccaccgtgctcgccgacgaaagatttaattgcagcagttgaattaatataagtaactggcaaaatagtatcaccaaacagatgttgtagtttgggccaagcgttggttaattggtgaatatccgccatatccgccatcgaacaaccagcgcgcatatccggtagcgtcacaatctgctcatttgtcgtaagcatatctgccgtttcagccataaaatgaacaccacaaaaaacgatatgttttgcttttttattatttgcagcaatttgtgctaactgtaaagagtcgccaattgcatctgcaaaaggaacgacttcatctttttgataatggtggcaaggaataaaaagatcttcgccgagttgtgctttgatttccgtgacacgagctatcatttcttgcgaggtcatatgtttatatcgagccggcatcgtatcttgttccactttttccagtaaattcatgcttttatacctcctttactattaaaactaatatcaagggcagaaacagaatgcgttagtgatcctaaagaaatataattcgccccacaacctctataatgattaatattatctaaagtgatatttccggaaatctccgtagtaatatggtttggcactagtgtaacaagttgtttgatttcttctggtgtgcggttatcaaacataatgatgtctgcaccagcttgaacggcttcttttacttgtggggcagtttctgtttcgacttcgatttttaccatatgtcccagtttttcacgaacagtagaaacagcttcggttataccaccagagaaggcgatatggttatcttttagcatgactccatcgtacagaccatttcggtggttaaagccgccaccgctctgtacggcgtatttatcgaaggcacggagaccgggggctgtttttcttgtatcacaaattcgaatagtcgaatcgtctaactgttttacggcaatatgggtttgggtagcaataccgctcattcgctgcattaaatttaaaataacacgttcaccggaaagtaaagtgcgaactggggccgagacagtcgcgataatgtctccttttttaattgtgtcaccatctttttttacggcttcaaattgcacgtttccaccaaggatttcatatactttgggcgggatagcgatgccacaaagaatacctgtttccttcgcaataaaaacgccttctcccattgtttcactggagaaaatactatctgagcttaaatcatgctgaccaatatcttctaataaaaatgcttgaattgcttgattcataagtattgagttcatttcgttactccttttaaaattctatgtgcgccaaggctttcagttcgttttaaggcgctttcggcaattaattttgaggtaataatcatatgacttatttcagctgtttctctcgtatggttagcataatcaaatgtttctaaccaatggagaaattcagtgattttctcaggttttcgtgtaattcctaatgtttcccaaattttttcttggagtatatgtttttcaggtaaatggggcattgttgtttgataagtggggggattctctggagctattattcggttgtttttttgcgtgtggatatattccgctactttttcaccaaaaacaagtgtttcaagaagggagttgctggcgagacgattggcgccgtgtacacctgtatttgccacttcaccaatggcataaagatgagggatattcgttttgccgttcaaatccgttcgaacaccacccattaaaaaatgtgcacctggatgaactggaattcgttttgtttcgcgaaatggtacttgatgttcgtctaagctggttgtaattgcaggaaatcgcttctcaaaatgagccaccttagtaatatcaagaaacacttggttaccacgctcaatttcttcaaaaagtgtggctgcaacgacatcacgtggagcaagatctgccagtggatgcacggtttccataatagccgacccatccgcgcgaataagtgtagctccttcgccgcggactgcctcagaaattaagccatgacaacgcccgtttagaaaaagtaaggttgggtggaactgaataaattccatgtcggatagtgtcgcatcagctcggtaagcaagagccaagccgtctccagaaatagttgcagcattagtggttacaggaaaaagttgtccaagtccgccactcgctaaaataatatgttcgccgtaataagtatgtagctggttttctttatctaaacagtgaacgccaattgctctaccgtcatgtttaataatctctatagccattttttgctcttgccagttaacctttgtcaatttttcttgcaaaaatgtagtaaggaatttgccggtttgatctcctcctgaatgcaaaatacgaggcagttggtgcgcaccttctaatccaagcgaaagttcgccatctttttcgtcaaaagtcattccttcatttattaatttttggatcacaatcgggccacaagtcacaagttggtttacagcgcgaactttattatgaaaacagccagcttgaaaggtatcgctaaaatgtttttttggtgtatcgctttttgatatagccgcggcgacaccaccttgagcaagcatagagttactttgttctttatgaccttttgtgattattgtcacatcatagtcctgcattaatctgagggcagcagtgcaacctgcgataccgctcccaatgataataactcgttcttttgtcatcatttccacctcttgcatagtaggttcgattaattgtatacttcttaatgaatatacagttgtcttgtcatctataatcacacaaaatcaaactaaattcaagtataaaattttaagggagagataaagagatgatttactttgaccatgcagcaactacgaaaatgagtgaaacatccttacaagtttttatggatgcctcgcgagaattcttcgctaattcggaaagtttacacgatgccgggacgaaatcagcagcccttttagaaaaatgtcgggaaagttttgctgagttattacaagttccaaaccgcgggattttatttacgagtggtggaacagagagtaatcaaatcgcgattcaaacgctactccatacaactgataagaaagaagtgctcgtaagtccgctggaacacgcttctgtttggcagcaactaatggcactcgaacaagcggggaagtgtcgtatgaaagcattaccagttgattcgtttgggcaagtaaatccagctactttagaaaaaatgatttctactgagacggggcttattattattcaacatgttaattcggaaatcggaaccattcaaccaatcgccgaactagctcacattgctaaaaaagcaggtgtcttttttcataccgatattgttcaatcttttggaaaacttgatttagatttaagtgatgtcactagttttagtatttcatcgcataaaatttatgggccaaaaggggcgggactactttttatgaaaccagattctcctttgcaggcagttttgccagatgtacatcatgaatttggctttagaccggggacggtaaatgttccagctattgctgcctttacaactgccgcctatgatataatggaaaatagagagcaagaagcgattagagctttgaaactaaaagctgcgatttgcgacacattagaaacgcgggtgaaagtcgaaggtggaccaaatacatcgccgtttattttaggacttactttgccaaatatgcaaggtcaggaagctttacttgctttaaacgaagcagatattcaaatctcgacgacgagcgcatgtagtttacgtgatttagccccgtccagaacattaatcgctactggaaaaacaacagaagaagcaaaccgttttatccggctatcttttggaaaagaaaatgaattaaacgatagtattatttttaaagaagaaatcgataaattactacgaaaaaggtgataagatgaaaaaaatattaggcgatacgcgtaggcaaatgattttaaaatggctaaaagaagccgaggctccaatttctggaaatcaattagcacagaaaacaaatgttagccgccaagtgattgttcaagatatttctttgttaaaagctggcaatgaaccaattatggctactccacaaggttatatttatgctaaagaaacgagttatacaggtgaaagacgcgttatcgctgtaaaacatacgaaagaacaagctgccgaggaactaaatattttggtggatcacggtgtttccattattgatgtgattgtggatcatccaatatacggcgaaattactgcttcactgcatttaaaaagccgttttgatgtagaaaaatttgtgcggaaattgcaaacaacaggagcaacgatgctttctggtttaacggacggaacccatttacatacgattgaagcagatacgaaagaacaattagagcaagcgattaaggcgctagataaagctggatttttaatctaaccatttttcaatataaattctaggaaaaagctagtaactatggtagaatgtatgttaggtatttataaacaatagtcgtatggaggtgctagatatgccattatcgccgctggatatacataacaaagagtttacccgtggttttagaggttatgacgaagacgaagtaaatgacttcctcgatcaaatcattaaagattatgaacaagttatcaaagagaaaaagcgtattgaggacactttaaataatagtgaagaacgtttaggtcattttacaaacattgaagaaacattaaacaaatcattaatcgtggcacaaacagctgccgaagaagtgaaagcttccgctgaaaaagaagcaaaacttattatccgtgaagctgaaaaaaatgcagaccgaattttaagcgactcactttctaaagctcgtaaaatcgcgattgaaattgaagacctaaaacgccaatctaaagtattccgcgagcgtcttcgtatgttagtagaagcgcaaatggatttaattaaaagtgaagactggcagcaaatgatggcttacgatgtagatgcaacagaactagcgtctattaaagaagtcgaagctgctgaatcagaagaacgttaaaaacgattataagagacaagtaaattttttagatataggatacaaagcgagttggtgcaaggtgtgagaccagctatcctctaaaaaatcgaaatcactctttagttctaacccgaaaaagcaactgcttgagtaagtgttagcgcgagccggcgttatggcattaatgaagtgggcaagcaattaacatgcatgtcaacaagggtggtaccgcgaatctcgtcccttttttgggagagatttttttgtgtttaaaaataaagttttaaaggagaagagagtatggaatataaagatacgttattaatgccaaaaacagattttccaatgcgtggaaatttgccaaacaaagaacctgaatggcaagcaaaatgggaagaagaaaagctatatgagaaaattcaagaaaaaaatgctggacgcaaggcgtatattttacatgatggccctccctacgcaaacggagagcttcatatggggcatgcgttaaataaaacaatcaaagatattatcgttcgttataaatcaatggctggcttcagttccccgtatgttcctggttgggatacacacggactaccaatcgagacagctatcgccaaaaaaggtgttaaacggaaagaaatgtcgatcgctgaattccgtaaactgtgtgccgaatatgcaatgacgcaagtagacggccagcgtacaggtttcaaacgccttggaattaacggcgactgggaaaatccttacatcactcttttaccagaatacgaagcagagcaaatcaaagtattcggtgaaatggcgaaaaaaggttacatttacaaaggtaaaaaacctgtttattggtctccttccagtgaatctgcgcttgcggaagcagaaatcgaatatcaagataaaacatctgcgtcgattttcgtggctttcaaagtaacagacggaaaaggtgtactagatgaaggtacgaatatcgttatctggacaacaactccttggacaattcctgcaaacatgggtattactgttaaccctgatttggattatgtagtaattgaatccgcgggtgaaaaatatgttgtagcagaagcacttttaccaagcttacgtgaaaaactaggctttgaagatgcgacagttgttaaaacagttcgtggttctgaacttgaccgcgttgtaactaaacacccattctatgaccgtgactctttagtaatgaacggcgaacatgccactgctgaagccggtactggtgcggttcatacggctcctggacacggggaagatgactttttaatcgggaaaaaatacgatttagaaattcttgctccactagatgatcgtggtgtatttacagaagaagctccaggatttgaaggcgtattttacgatacagcgaataaaatggtgacagaaaaactagaagaagtgggcgcattactaaaaatggaattcatcactcactcttatccacatgattggcgtacgaaaaaaccagttattttccgtgctacagcgcagtggtttgcttcaattgacgcattccgtgatgatttactcgctgctgttaaaggtgttaactggactcctgcttggggtgaaacacgtttattcaatatggttcgcgaccgcggcgactgggttatttctcgtcaacgtgcgtggggcgttccactacctattttctatgcggaaaacggggaagcgattatcacagacgaaacaatcaaccatatttcagaactgttccgtgagcatggttcgaacgtttggtttgagcgtgatgtgaaagacttattaccagctgggtttacacatccaggtagcccaaatggcgaatttacaaaagaaacggatattatggatgtttggtttgattctggttcaagtcatcaagccgtgctgaatgctcgacctgaattaagtcgtccagctgatttgtacatggaaggctctgaccaatatcgtggttggtttaactcatctttaacaacagctgtagcgatcactggcgaagcgccttatcgtaatgtgctaagtcatggttttgcacttgatggtgaaggtcgtaaaatgagtaaatcacttggaaatactttacttccaggcaaagtaattaaacaacttggtgcggatattgttcgcctttgggttgcttctgtagattatcaagctgatgttcgtgttagtgatgaaatcttaaaacaagtatccgaagtgtaccgtaaaatccgtaacacaatgcgtttcttacttggaaatatcaatgactttaatccaactactaacggtgtttcttatgaaaacttacgtgaagtagataaatacatgctgattaaattaaacgatttagtgaaaaatgtgaaggatagctatgaagcgtttgaattctctactatttaccaccaaatcaataatttctgtacagtagaattaagccaattttatatggactttgccaaagatgttgtttacattgaagcagcggatagtcatgatcgtcgcgctatgcaaacggtcttttatgaagcagttgttactttgacaaaactacttgctccaattttaccgcatacgacggaagaagtttggaatagcttgattggtgaaggcgcggaaagtattcatttacaagatttaccagatgtaaaagtattagctgatagtgaagaaattactgcgaaatgggacgcattcatgcaaatccgtgataacgtccaaaaagcgctagaattcgctcgtaatgaaaaacttatcggtaaatcaatgcttgcaaaagtaactctatatgtagacggtgaagcaaaaacattgtttgattcattagaaggcgattttgcacaactattcatcgtttctgattttgaactagtggaaggtttagaaaatgcaccagaatccgcatttaaatcgaatcaagtagctgttcaaattactgtagcagaaggcgaaacttgtgaacgttgccgtgtagtgaaaaaagatgtaggcgtaaatccaaaacatccaacactttgtggccgttgtgctgatattgttgtaaaacactacgaagcttaatgctcgcttggggaaaatcctagtagtttaaaaaggaggttccccaagcttttttaatttaagatgtggtattatagacgtaattccaaataaaggaggttgcttgaaggaatggcaacaattcactttacaaaagtacatggttcgcaaaacgattttttcttagttgatgaagaagaaaatcaaattatggattggtcggatgcgaaacgtgctgattttgcaataaagctttgtgatagagagcattcgcttggtggggcagatggtattttatatgtcacaaaaagtaatgaagctggaccaattggccaaatgcgcgtcgttaattcggatggatcaattgcgtcgatgtgcgggaatggcctaagaacggtagctcgttatttacttgaaaagcacgcattaacagaagcaaaagtcgaaacaatgaaagcgatactggatgtcaaaaaagcaacttcacttggttttgatataccaacgtaccaagttgaaatttctccagttaaatttaatgcagaaagtttaccaatgaatgtcggtgtggaaaaattatttaatcaagtcgttcctgaactagattcggaattagctttttctgctgtgtcggttccaaatccacacttgattacgtttgtggaccaaactgtgttagattcggataaacaagaaactttagcgagttatttaaacagcgaaaatccttattttccagatggtgtcaatgttagttttgtgaaacgattaagcgatgatgcgatttatgtgcggacatttgaacgcggtgtaggttttacgaatgcatgcgggacagcgatgtcagcttgtagtttaattaaaaaaatgttagataaagatacttttgaaacaccacttaatgtttataatgatggcgggcgagtacaggtgactgccaaaaaagacgaagctggtgaaatttcgctacaattaattggtaatgcaacatttgttagcacggggtcagttagctacgaaagaggcactgtaactgaacttacaaatgaagcgacaccagaacaagcgcagtatcaggagcttgtaaaagaagtaaagcaatttttaaaaacaaccgaatgaaaaggagttaaccatgaatacaaatcgaaaaaaagcgacaccgttattcgttattggcggattttgtctgattttatttattacaatcgcctcagctattgcaacagaaagtaactgggtagcacgttttgatctaagctggattgaaaagattcgcggcgggattcaacctgataaaacagctatcgttaaactagtgaccaatttaggtagtgcagaaacaactattattttaactattgttgttgttcttatcctattctttttacgaaaatttgttgttggactatggtttggaggaacgatgcttgcttgtggtgttgtccttaatctagtcttgaaaacattagttgctcgtacacgtccagatagcgttaactggttaatagatgagtcaggttttagttttcctagtggacatgcgactgctacggcggttttctatggacttgcagcgatgttcttaattttcacagtgccaaaaatgtggcaaaaaatcgttatcggaattatcggctatggatttatcttgtttgtaatgtatacacgtgtttatttaggtgtgcatttcccaacagatgtactgggcggatttttacttggtacggcttctgtactcatttctttaggcgtttatttcttagttcgtaaaccgttacataatttacttgtgaaatggcgtattaaagataaaagtattgtcgattaatagaaaaccctgttataagaattgacttatagcagggttttttagttaataaactgaatactctattttgtaaccgtgcgactttttcacttgatttatttgtccgttggcgttaatatataagtgttgcaggaagtatatttatgtattagtaaggatattgatgtaaatgagtatctttgctaatatgtgaattttgtaattgaaaaaatgattagcttgttgttaacatctttttcgttagtaaaagaaacatattaagaaaatttttggaggtttgtgaaatatgcaaacaggtacagttaaatggtttaatagtgaaaaaggtttcggtttcatcgaagtagaaggcggagatgatgtattcgtacacttcagcgctatcgaaggtgaaggattcaaaactttagacgaaggtcaaagcgttgaatttgaaatcgttgaaggtcaacgtggcccacaagcagaaaaagttactaaactttaatctgatcacgttaaactaataaaacacgcagcggacttcttagggagaagccttgctgcgtgtttttttattttagataaattcggtaagttttaatttcaaacggagtaatggcaaatgttgctgtttcaagtgttgtttcgttttcctccagtaagttacattctgtgatggaagtaatagcataatcgctagttagcgtcacttcgccgtgtgtgcctgcgaattcatgcagtcggatgataagaccattaccgttctcagcttgtttgacgctatcaatcatcacataaggattagtaacttggaaaagcgagaatggttcgatttctccgttagatgtgaaaatcggattgtttaattcccaagcagtttggactgtttttccgtctaagaaatctccttgatgtggaaaaagtgaatacgtgaactggtgaagacctaaatcggcttctgggtcagggtatccagctgctttgagtaaggttagtcgaatcgtcgagtctttaatatcatagccatatttggaatcatttagcaaactaacccccgtaatttttctcggaaagatcggtccactgatgcccaactgtttcaaaacgagcataatcccagcttgtgttccagtgtgtcggtcgttttacattaccaaattgaatatcataactagcttcactggcatgaacggaaacagggaaagcgactttcagcaactggttacggtcacgccaatccacttctgtttcaaatctgatttcagggctctcatggtaaaaatgaatccactgcgtaatttgtgatttctctgagtgaagcacctgtttgatagtgagttcaagtggtccattattgattacttcaaaagagtctaatgtggttatttccttctgtttttcttgataaaataaatcaatatcccaagcatcatgccacataggcttatcttcaaataattgaaatacattccccctcgcgttttctgctaatacttggcggttattttttttgtcaaaaatggaagtgaattgaccgttttcattccaagttatttgataatagggtgtttctaattgcttgtctttgtaagtgaaaggcgattttgttagctcacttgttgtttctttaacggaaatacttgtggcaccgagcgctggcaagttatggtgctggatgagccacgcgccattagctaatttttgtgcagggagtcgcttatttttttgatcataaaagactaagttgctagcaggattatcggctttgatttcgatatagcgcggacgattccaagtggaactattccatagcgttattttttcagaagcttgctgggttagtttttctagttgtttagaaataatcgtattgttttcggtgagtgcttcagtgtactcaattagcgcatcatcatatacttctttgatggaagagccagggataatatcgtgaaactgatttcgaagtaatatttgccaaatgttcgctaatttttcggtcggataagtagttccttcttttaagttcgctaaaacagaaagccattcgctatttcttaaaccaagctcgattttacggttcatttttttcgtgaaggcttggctggtgtaagttccgcggtggtattcaaagtaaagttcgccgttccaagtgtggacatattgatcagtgctctgaatcgtttcatgtaaattattaaaataatcggtagcgctttttggttttacttcagggattcctggcattttatcatagcggcgacgcatctcgagcatttcgcgatttaccccgccgcctccatcgccgtaaccataagcaagtaataattcttggtttatttctttatcttgatatttatcccaaagtcccaccagttcacgcgcggtcattttaccgttataagtagaaattcggctgtttttttctggtgcagtgatgaagtgagttaggatttccgttccgtcaataccgcgccactggaacgtatcatgcggcattcggttatattgattccaactaattttagtcgtcataaaagttttgatgcctgatttacagagaatttgcggcaaggcccagctataaccaaatacatcaggtaaccatagaaaactagaaggtttgccaaactcttcgcgtaaaaatttctgaccgtagagcatttgtctgacgagtgattctccgctagggatattacaatcggcttcaagccacattccgccatcagcttcccagttgccttcctcgattttagcttttattttggcataaatttctggataatcttctttgatgtaggcgtacagttggggctgtgactgcaaaaataagtattcaggataatcttccattaaatggagaacggttgagaatgagcgcgctgctttttcgcgggtatgttttaaacgccatagccatgctacatcgatatgggtatgaccaactgctgccactttgataggaaagtttttcggcatttcttttattgctgcttgcaagatttggttggcgttttccatggaggaaagattttggttagagcctggtgttccccaatcaatcgctaggtaagcgcggttaatagcttgaagcaggggagcatgcgtcggattattttcttccagttgatcgagtgtttttaaggtagctttacttgtaaaatataaatcgtcaatcacgaggtttaaataaccaataaatgcttcttttaactgatgtgtttggatggaaggaacgccgccaccttcaagaccagaccataaacgaaagacaagttcggtcgtttttccggcaaaattatctggaaaaagaacttcttggtgattttgatcgacgccttggaatggttcgccgtttacgaataataaggattcaaagccagaattatgaccgtcgccagtattaccaaaatcaaagtaaccgatcaagcgagtaccttctttggcactggggaaggtaatcgttgtttttaaccagacgtagcgatcgcggccggcccagttttctccaatagttaattcgttatcataaatgacattttgaggacgcgctgcaatgtttccgtccatatcctcagctgcttggaacttctgaatcggatgcgttttctcatagcggtaaagggcgacttcatctagtctaccgcgtaatttatcttttgtgaaaaacatctatatactcaaatcctttcttttttgtctagaacggtttcaatatatcatagcgggaaaagaagtcaatttggcttttgaagggaatttggcaggggcgtttttctcatctttagagcggtaaggaataagcttttttgaaatggacaaatcaagggaaaatggattattcatagtagtttttggcgtagcattgcaattcgctttagcccttactatacttagcttgaaagcgaatacaaaaaggatatttggaggggcaaaatgactagaaagaaagcgcatattatatcgcattctcattgggacagagaatggtttttaccactggaaagcttaagatttaggctcgttacacttatggatgaagtagaagatttacttgataaagaagctggttttaatcattttcatatggatggacaaatgattatgttagaagattatttagctgtaaaacctggtaaaagagaaaaaatgaaacaactggttgctgatggaaaattacgaatcggcccttggtatatgttacaagatgcttttttgacgagtggagaagcgaatattcgtaatttgcaatatggtttagaaatggcagaagaattcggtcaagcggaaaaaattggttattttccggatacgtttggtttatatggtcaagtgccgcaattaatgcgtcaagctggttttgacacggttgtttttggacgaggtgttaacccaactggctttaataaccaagtatttgatagtgcttttgcctcgaaatattcagagatgttctgggaaagcccggacggttcgaaagttttaggaattttactcgctaattggtattccaatggtaatgaaattccaactgataaagaagcagcaaaaattttctgggataaaaaattggcagacgtggaacgatttgcgtcaacagatgaatggttatttatgaacggttgtgaccaccagcctgtccaaacagatttagcggaagctcttgaagtagcgcgggaactatatccagagattgattttattcatagtcattttgaaaaataccaagatgctgtcaaggctgggcttgaacctgaaaaattacaaacagttcacggagaattaacaagccaacaatcggatggttggtcaacgcttgctaacacggcctcctcgcgtatttatttgaaacaagccaatgctaaaattgaacgtttattagagcgtttagctgaaccgatttcggtaatggcaacagaagctggtgttagttatccgcatgaatatctggcttttgcttggaaattactcatggaaaatcaaatccatgacagcattacaggatgtagtttggatgaagtgcaccgcgaaatggaagctcgttttgaaaaagtagaacaaacaactatggcgattattcaaaacgccgcacgtaaaataacggaacaaatcgtaacgaatgatgcgggtattccaattacggttttccatgcaggtggggtagaagcaactagaactgtcgaacttgaacttgaaacagacgcgattcatttttctgagatgcattttgaattgataccagatgaattagcaaaacttcccgaacaaagttttcggatggaaacaagtaatggggaggaaattccggttgtagttgagccacttggtattcattttaactatgatttaccagaacgaaaattccgcgattcttattttgcaagaaagtataaactaacctttactgtggaacatttaccagcagttgggtaccaaacaatctatgcgcatccggtcgcagtttcggatgacgaaaaagagctaacaggggacttacagttagaaaatcaatatttaaaagtggaaatcgcgccgaacggaacttactccattttggataaagaaaaggctgtagaagtcgcgggacttggggcatatgaggatgttggcgatattggtaatgagtatatgtttaaagaaacaggcgataatttacgcataaatacctataattcaaaacctgagattcgcgtgttgcgtgaagataagcttggaaagacaatcgaaattaaacatgaaatagaaattccagtaagcgcaagtgcgacttttgctgaagaaaaacgccgactagtatggcatccagaccggacgtcacatcgttcagagaaccgtactacttttaaaatcactacagaattgacgctaaataaacatgataagcaactaactgttcgcgttaaactagataaccaggtggatgaccatcgccttcgcgtacttttaccaactgggaaacaaacagaaacacatcaagcgggcagtgtttttgaagtagtaacgcgcgcgaataaacaagtggaagaatggacaaatcctgctaatgataaccggaaacaaggttttgttactagtggaaatatcgttgttgcaagcctcgacttaccggaatatgaagtaagcgagcaaggggacagattggaactaacactgttacgcgcagtatcagaaattggcgattggggtgatttcccagcatatgaagcagaatgccaccgcgaaatcacagccgagttccatgtattcttaacagacgaatcaagcgtcaacgtccctgcacaagttaccgcactcttaacacctacttttgccattcaacacccgtcatcatcaaaagaaaaaattcttgcagatacaaaagattttgcgaaatggaaagtagcagacggacttgttttttccgcatttaaactagcgaaagacaatcaaccaattattcgtttctatcaaaccgcatccgagccaaaactattaaacacggttaatctgtggagaaaatcgaccattttagaagaaacggcaggagatgcaaaaaatcaatttaccgttaaaccaaacgaaattatcacattaaaaggagtgtaattcatgacaaagaaagtaccaacaagttttaacaaatggattgatatagtaaaaacgacttttccagaaaatgaaaaattacatcgcatgtttgaaaaatgttttactaacacctatacaactactttgcaggaaacagaagaagggcttccgtttgttattacaggcgatattccagccatgtggttacgcgattcaacgagccaaatccgcccttatttaattgttgcagaagaagatgaagagatggcgacgttaattgagaatctcgtaaaactgcaaacaaagtatattcttcatgatccttatgcgaatgcttttaataaaactgcgaatggtgccggttttcaacaagataaaacagagatgtcagaccttgtttgggagcgtaaatacgaaattgattcactttgctacccagtccagttagcttatctattatggaaaagtactaatcacacgggtcattttaccgaggaattcagacaggctttgcaccagattatcgacgtatttaaaacggaacaaaagcatacggagcaaagtccatatcgttttgaacgagaaaatgtgcgtcaatcagatactttaaataataatggcaaaggaacagatgtaagttatacggggatgtcttggagtggatttagaccgagtgatgatgcgtgtatgtacggttatcttgtgccaagtaatatgtttttggtcgtagtgatggattacgctcaagaaatagcggcacagttttacccggacgataaggaattaatccaagctagttcggagttaagagaagaagtcgcaactggtattgaaacatatgctaaacaagcgcacccgtattacggcgatgtttatgcttatgaagttgacggaactgggcgcaagttatttatggatgatgccaatgtaccgagcttactcgctgcgccgtatctaggtttttgtgagaaaaatgatccagcatatcaagcaactagaaaactcattttaagtcgagaaaatccttattttgtagaaggtagcgtacttactggaatcggtagccctcatacgccggatcattatgtatggccgattgcgctcagcattgaaggtttaaccgcagaaacagaaagcgagaaacaagctattttagagatgttaatagctggtgatggtggcacggattacatgcatgaaggagttaatgcttcaaacccagctgaattcactcgcgactggtttgcttggtcgaatgcgatgtttagtgaatttgtcctaagtttatgtggtgtatacgtaaagggaagtccattaagtaaataaaaaagaaaagtctgggcgaaaaactcaggctttctcttactatcaaaggagaaaaaagaatgaaacttattgataaattctcagttattagtgattggataatacggcttgtttggacgaatttagtatggcttttccttgtattaataggcgggattgtgcttggatttatgccagcgacagttgctctttttacgattacgagaaaatgggcgagaggtgatttagacacgcctgtttggaaatcagcttggcaaacttataagcaagtatttgtttctgctaatttagcaggtgggatttttgtagccattgggatatttctttatgctgatttacggattgtttttgaactgatgcaaggattttggtcgaccattttatactttttcttgatgttcttactttttctcgttggtattgcctttttgcagtattttaccgtatttgttcacttccaaatgaaaaatgttcgcgcttatgttgggcaagcattcttactagctattactagttttaaaaatacctttatgattgtgattggccttgttttttgtgcttggttaatttctaaaatgccagcttttattttgtttatttcgggcgttttaccaagttattggataatgaaaatcaacttgcaacgttttaaacagatggagccaaagtaaccccttacattatttttgatagtatgcaataatcagaaaggaaaagggggcaatgaattagaatgacacaagaattaccacgtaagcgcgtttttaaaaggatgttattaattttttctttaaccagtctttttaccgtgagcttgttactttttttcatttataagtactataccaacattcagctcgatacaaatcttcagcgcgcagaaactatcgctagcaagcagttggaagctttaactgaaaagcaaaaggcattaattagtttaacccaagatatttaccgaaatagtgatttgatgcaagatgttcaaatcgcgatgacgaacgactacggtagctacactgagcaaaatatcgacaactattttaaaagtaaaaatttttattctgtagatatgcaaacctatttacagtcttatttttcgtatgatgaagatattattgctttgcagcttatttcagatgacggaagctactcctatacattcccgagtcgttaccgtgaatggaaagaaactgttgatacatatggtgaagaaaatattgctagtcaagcatcgaaacaaggaaatttttatacgatagaaaataaaattgtcgtgaaacagccgattaacgatccgagtacattaaaacaaatgggctatctattactttatattgatccaacctttttaaacaaatggattacgaaagattataaaaactcgattttccaaataaataatacaaaaggggctgagttatattccaatcatcctgcaaaacaaataaccccacccgaaaaacaaggctggatgaatgtagataataagaaaatatactttcaaaaaacagaggatgaaactactggcttaaaaaataatacatttttatatcgtgtcacggatgatagcgcgccattaatcgagttgactttatttgggattggtttgttactcgttattttttctattagcgttaattttgtaataagcaggcgctactccaagcggattttgacaattattggtgggatgaaccgagtggaaaatggaacgcttgatgcaaaactacctgtcgataataacggggatgaactgacgatgattagtgagcgatttaaccatatgactgaaaatctcgacgcgtatgtgaagaaggtctatagccttgaaatggaagaacaaaaagcgcgactcaaagcacttcaagggcaaatgcaacctcattttctttataattctttagaagcaattagaatgaatgcccgcgtagaaggagcgaaagaaacaagtgatatgatttaccaacttgcgacgctgctacgctatactgctaaccaccgcgaaatcacgactttaggcgaagaaatcaattatgtaaaacaatatgttcggtttatggaaatgcgccatgaacagccgattaagttagaaatccatattgaaaaacgttttaatcatacccatattccacgatttgccttgcagccgctcattgagaattttttcaaatatgcctataaagaaaaccaacatccagtagttacaattacggtcacggcggaaaataacaatttacaatttcaaataaaagataatggcaaaggaatggacgcggaaaagctaaaagaagtccaagcgacgattgaaagtaaagctgaaacaagccacatcggcctagctaatttaaacaaacgactgcaacttttatatggtgaagcttactcattaacgattacaagtaagccaaatgaaggtacgatcattctatttcaagtacctcaaaatacgggaggagaaaagtgatgctaaaaatagtactagtagacgacgaaccccttattcttaaaggtttagaaagcattattccagagtttgagcaaaacattgaaattgtcgggacagccaaaaatggcgcactagccttagagttatttgcggatcaagaagtggatgtccttttaacagatatagaaatgcctgtgatgaatggtttagaattaatcgatgcatggaaaaaacgccaaccgactaccaaaaccgtcgttctttccggatttgaagattttcattatgtaaaacgtggactttcagcgggaatcgaaaattatttattaaaacctttaaacgaacaagaattaaaagaaacattcgtacaaatagagaaaaaacaagtgacagataatgtcgtaccaagggaagaagcgtactacattttacgggacaatacgatttggcgctggctaaatttacgaattaataaagaagaatgggaagagcgacttgcgttatacgatatgactttaaatcaaaacgagagtgccgtcctcatccagattcaaccaactaaagaaaccgacatggctgaatggaaaaagctttctgaacactaccggcgcacctatccatttatgctacttacgccagaaaatgaaatcatcttaggagtaaccgaacaaacctctatatccgaacaaattttagcggttcatcaagatatgaagcaacgcatttcaaacgaagctttttatatttttgttagcgaaaaagtacaaggggaaatgatgtatccgcaagcattccgacaactgacaagattacttccagaacggcttgtaaaagagtccggcagcttgattgcctaccaaaaacgaacgaaacacacttggcgaccaaaaagaaaacaacatcaacttgcaaaactactcgtaatgaataatgaaaaagaaatcaaagcatggattaacaacttttttaaagaatggaacgatcacaaattagaaagcgatccgcatcaaatgctccatattttaaatgaactacttgtgatgatggcagaatcagaccctaaagaattaagtgagtcaatgggacgaatcgcagaagaaacaagtattgaggggctagaagaagcaacactcacctatgcgattcgttattacaatcgtaaaaaacaaaccgatgaatcgaaaagtcctattatccaaaatgtattgtcgtatattaccgaacatttttcagaaggcatgtccttaaaaacgcttggcaacgattttcacattaatgcagtctatcttgggcaacttttccaaaaagaaatgggtgagcattttacggattatttaaatcgctaccgagtaaactatgcgaaggaagagttgctgcaaacaaaagataatttaacgattattgctgggaaatccggctatacagatatggcctatttctatagacagtttaaaaaacatactggcgaaacaccaaatcgttaccggaaaatccatcaataaaattatttctaatatttgtctataaatctaaacatccgcaactattttaacacccttaaaaacgataaactaaagatgttgaaagcacttacaaaaaagaggggtggatggattgaaaaaagttttatcacaaattcgagctaatcggatttggctattaatggtacttccgggccttctatggtttctggttttctcatacttaccaatgtttggtacagttattgcgttcaaagattacaagattgatgggaaaggatttttatccagtattatgaacagcgactgggtggggcttgaaaattttaaattcctattccaaacaaacgacgcttttattattacccgaaacaccgtcctttataatttagtatttattatcgttgggctgtttcttggcgtggcacttgcgattgtctttaacagcttactaaataaacgaggagcaaaaatttatcaaacaggaatgcttttcccgcatttcttatcatgggttgttgtgagttatttcttatttagctttttaagtgaagatagcggactgatgaacaatattttacttgcattcgggcaagatcctgtttcatggtataacgatccgaagtattggccgtttattttaatcatgatgaatgtctggaaagggcttggttatggaagtattgtctaccttgctgcaattgccggaattgaccgaacttactacgaggccgcgatgattgacggcgctggcaaatggcaacaaattagacatgtaacgattcctgcgctaacaccactgatggttattttaacgattttgaatgtcgggaagatttttaattcggatttcgggttattttatcaattaccgcgaaattcagggccactttatccggtgacggatgttattgatacatatgtataccggggcttaacgtcgctcggtgatatgagtatgagtgcggcagctggtttctatcagtcgattgtcggctttattctagtgttactcactaactacatcgtgaaaaaaataaacccagaatatggcttattttaaaaaaggaggcgagtcgctttggcagaacagcttgaagcagtgagtgaaatagaacaagtgcgaggcgaaatggaaaaaccagcaaaaaacaagccggcaaaagatattatcggttttggcaaaaagatgaatgtggcgatgaatgttatgctcgctttcttagcgctcatctgtatttttccatttttatatattattgttatttctttttcgagtgaaacatctctggcggcaaatggctttcaactaataccgaaagagtggagcatggaagcgtacgaatatttatggaagatgaaaggtcagcttttacaatcatacggcatcacgattgtagttacagttataggtactgtgtgtagtgttgcaatgattgctctttattcttatgcaatatccagaccacaatttaagtatcgccgtcaatttacatttattgccttcttcacgatgctgtttagtggcgggatggtgccagcttatatcgttatgacacaatttttgcacttacgaaatagtatttgggcaatgattttaccactagcaatgaatgctttttacattatgattatgcgtacatttttcttacggtcgattccggaaccaatccttgaagcggcgcggattgagggcgcaggggaactaaggatctttttacaaatggttgtgccactttccttaccaggacttgcgacaatcgcgcttttctctacgctcggttactggaatgactggttccaagcatcactttatattgataatccaaatttagttccattacaatctctgcttatgaaaattgaaaacaatttagaatttatgcggcaaaactcagaaattgcttatactgccggcgcatttaagtccattcctcaagacggggcaaaaatggcgatggttgttatttcaactttaccaatcgcgattacctatccgtttttccaaaaatacttcattagtggactcacaattggcggcgtaaaagaataaaaagatggagggaatttaatgaaaaagaaatggggagtaatcatcgcatcactttgcttgctactagttttaggtgcgtgcggaagcgatgaaaaagcagatgcaaatgaagttccgacactgaaatggtacatgattgggacaccacaaaaagacacggaagaagtaatgaaagaagtaaataaatatactgaagaaaaaattggtgtcaaagtagaaatgacacaaattgactggggcgactacggcaaacggatgcaaacagttattaactctggagaaaactttgatattgcctattcagcagcaggagaattcgtttcttattcgcaaaaaggcgcattcttgccactaaataaatatctagacaaagaaggcaagaaaatgaaagctgaattaaatgaagttctttgggaaggagcaacgattgacggcaatatttacggtgtaccttccaacaaagaagtcggcgaacaacaagtctatgttttcaataaaaatctagtagataaatataaaatggacatatcgaaagtaaaaaacttcagcgatttagaaccaatgctaaaaaccattaaagaaaacgaacctagcatcacaccaattggcgggaacaaagattttaaaccagcattttcatatgattatttaatcgataatgctgtgccgcttccttttgccgtgaatcaatacgaagatactggtaaaatcgttaacttctatgaacaaccagatacattagaaaccttaaaatcgcttcatagcttctaccaaaaaggttatgttactaaagatattgccacttcaactgatccatggtcttacgataaagaaaactggtttgtgcgtattgagaaataccaaccatacgcagaaaacatttgggataaaaatacaggcggtaaatataaagtagtcacacaaccaattgccgaaacaccaatcattaaaaataactcagtcacaggcgcaattcaagctgtatccgtgacaagtcaacatcctgaagaagcagtgaaattccttgatttactaaacacagatgaatatttacgcaatttggttgataaaggaattgaaggcacccattataaagagttagatgatggcaaaattcaagatttaccagcacgtgtggaacgttatagcatgccaacttatgcactaggaaatcactttatccttaaattatatgaagatgaaccagccgataaatgggatcaatttaaaacatttaataaaaaatcagtagcatcaccgggcttaggtttctattttgactcatcaaaagtaagaacagaaatcgcttcaattacaaatgtttgtaatgaatttgctccagcgcttctaaccggaacagtcgatccagtagaatacaccgagaaattcaaagctaaattaaatgatgcaggtatgaaaaaagtaatgaaagaaatgcaaaaacaatacgacgaataccgcgccacacaagaataagaaacggaaagaacttagtttgactaagttctttctttttttgtataacagtttttatgtaattatataacagtttttgagtcagtaaccttgcaaaaattcttttgagtagtataatgagtctagtgaatgagattttattataatctgtactactgaaatataaataatttatataacaaaaggatgataaagatggaaaagcatgaaaaagaccaaacaaaaggtaaatcaggggcagacttagttgttgatagtttaataaatcaaggagtaacgcatgttttcggtattccgggtgcgaaaattgataaagttttcgatgtaatggaagagcgcgggccagaattaatcgttagtcgtcatgagcaaaatgctgcttttatggctgcagctatcggtcgtttaactggtaaacctggtgttgtgcttgtaactagtggacctggagcttcgaaccttgcaacaggacttgtaaccgcaacagcagaaggggaccctgtagtcgcgattgcggggaacgtaactagacaagatcgtctaaaaagaacccaccaatcgatggataacgctgcacttttccgtccgattacaaaatatagcgaagaagtagttcacgctgaaagtattccggaagcaatcactaacgcatttcgttcagcagcagaaccgaaccaaggcgcggctttcgtaagtttaccacaagatattgtgaacgaaccaaatgtacctgtaaaagcaattcgtccacttgctaaaccagaaaatggaccagcttccaaagaacaagtcgctaaattagttgctcgtttgaaaaaagcgaaattaccagtattgttattaggaatgcgtgcctcaagcccagaagtaacaggcgccattcgtcgtttactgcaaaaaacaagtatcccagtagtagaaactttccaagcggcaggagtaatttcacgtgatttagaagataacttctttggacgtgtcggtctcttccgcaatcaaccaggtgatattttgctaaataaagccgatttagttattacggtaggttatgatccaattgaatacgatccgaaagcttggaatgcatcaggcgatagaacgattgtacatttagatgacatccgtgctgatattgaccattattaccaaccagtgaccgaattagtcggaaacattgctcttacattagatcgtgttaatgcgaaatttagtggtttggaattagctgataaagaacttgaaactttaaaagaacttcatgcgcaattagaagaaagagatgtaccaccagaaagtgatgaaacaaatcgggtgcatccgttatctgtcattcaaacgcttcgttcggcgattgatgataatgtaactgtgacagtcgatgttggctcgcactacatttggatggcgcgtcacttccgttcttatgaaccacgccgtttattatttagtaatggtatgcaaacgcttggtgtcgctcttccttgggggattgcagctacacttgtgcatccaggcgaaaaagtcgtatctatttcaggcgatggtggcttcctattttcagcgatggaattagaaacagctgtccgcttgcgtgctccattagtgcatcttgtgtggaatgacggaagctatgacatggtcgctttccaacaaaaaatgaaatacggcaaagaagcagctgttcgttttggcgacgtcgatattgttaaattcgccgaaagcttcggtgcaaaaggacttcgtgtaactaaaccatcagaacttagtgacgtattaaaagaagcgcttgaaacagaaggcccagtcgttgtagatattccaattgattaccgcgacaacatcaaacttggtgaaacattactaccagaccaattttattaaaaagcaaaaaatctctcggactttccgggagatttttttagttaaaggttgacttggagtgagcttcaaggtatatgctgtaatagtactagaaattaactaggagggttttcaatggaatatgtgaaatttggcaatactgggatggatgtttcgaaaatttgtttaggaacaatgggctttggcgacaaagataaatggatccacaaatgggttttggatgaagcgaatagtcgtccaattataaaaaaagcgcttgatcttggcattaacttctttgatactgcaaatatttattcttacggcgaaagtgaaaaaattgttggccgagcactcaaagattatgctaaccgagatgatattgtcttagccacaaaaatacaccaaacgatgcgccctgatcgtccgaatagtggcggtttatctagaaaaacgattttaagtgaaattgaccatagtttaaaacgcttagaaacagattatgttgatttatatatcattcaccgctttgatgaaaataccccaatcgaggaaacaatggaagctttacatgatgtcgttaagtcgggtaaagcacgctatatcggtgcaagtgcgatgtacgcttggcagttccaaaaagcacaacgcgtcgcagaaagaaatgggtggacaaaattcgtttccatgcagaaccattacaacatgatttaccgagaagaagaacgagaaatgattccgttttgccgggatgagaaaatcgcgattacaccttacagcccactagcatcaggtcggttaacgcgtgattttgcagaaacaactaatcgttcagaaacagacccaattcaaaaatctaaatacgacggcatgatgaattcggataaaggaattattgaacgcgtagctgaacttgctctagaacatgaagtatcacgagataaaattgctttagcgtggttgttaaataaagatgaaatcacttcaccaattatcggtgctcaaaaagaaagtcatttggaaagcgcaattggagcgctagatattaaattaacggaagcggaagttaattatttagaagaactatatatcccgcatccagtcgttggcgccctccctacaagtaaataaaaatatggagcatgagttagaaaaaactaactcgtgcttttttttatggaaaaggctattgacaaataatttgcaaccgtttacaataaagtggtattaaaaatagttaaagctgtatcttttataaacttaaatgttatagacgattttaaaataagaggtggagacatggagtataaggacttatcgccagctgtgcaaagtgaagaacaattaagacagcttattcaagaaaaagtagcagtaggagaaacaagcttcccatcagaacgagcccttgagaatgaactaggtgtcagccgaaccacacttagaagatcactcgatacgctcgaaaaagaagcagtaatccaaaaaagaaaccgtaaaggcatcgaaattaaccaaaagcaaacaatcaacattttgaaaatgaattccatgagtagtcaactccctggcgagcaaagagtcgaggtattatcccaagaaatagttgaaggggtagataaagtaaatcgctttttgacacttgatgaagataagcctgtatttaaactagttcggcgaagaatcgttgcagaaaagccgttttcttatgagatttcatttgtagacagcgctagattttctggaattgagaaaattgatttaaataattcctcgctctacaatgttttagaagaaaaatttggtatcaaacctacttatggccgcgaagaattacgttttgtatccgcgaacgaaaaactggcagaagctttgaaggtccccctaaacaccccgctttttgaagttgtgagtaaagcatttgaccaaaatgatgaaccgtttgagtacagcaaacaatatctaatcggtaatcaaatcaaatacaaaattaatgcgaaaaatatatttgattacttggaggacgagtgaacatggcagctaaaaaaccattatttgaagtaattgcttcgaaaataaaagatagtattaatcgtgatgaatataaaacgggaatgcttatgccaaacgaaactgcgctgcaagaaatttattccagtagccgaaccacaatccgtcgcgcggtagatttattagtggaggaaggtctcgtcgtgcgtaaaaatggagtaggactttacgtgcaaccgaaattaaccgcgcaaaatattttagaaatgacaggtgttatgaaaaatgataccaatgaaaatttaaagaaagacattaaagacttttacattcgtaaagctgggaaattttacgcagaaatattcggaatgaaagaaaatgagttagtttactccattaagtttgtgcaaaaaagcgagcacggtgccacactagatcgcttaattttaccactgggtttataccctgatttacaagcgaaggattttcaaattattaatattatagagcttgttaattcaggtaaatataaattatttgagcttgagcaggaacttcaacttattttagctgggaatgagcaaatcaaaaatatgcatttaaatgaaaatgatcctgtttttaaattaagcagcgttttttatgcggaaaatgacatgccaattgccatccaatatcattatgaagatgctgagtcaaccaaatatgtagttgattttaactaacaataaggaggaagaaaaaatgattcaatttctaagagtagaccatcgtttactacatgggcaagttgcggtatcttggttcaatgctttagatgtaaatacaattttagtggcaaatgatggggtagcagcggacgattttcgcaagtcggcaatccgtttagctaaacctgaggccgcaaaactagtaatgaaaagtatcgctgaaagtattgactcaattaattcaggagtgactgataagtataatttacttattgtcgtggaatctgttgaagacgcttacaaactaatccgcggtacaaacggaaaaatcccgatgctaaatctcggcggaactaaacaacgagaagggacatctaactattcgaaagcagtcaatttaacccctgaagaagtagaaaaactaacagagcttcaaaaagaaaaaattgatgtatttatgcaacaagtgccaaatgagaaaaaagtaacctttgaagcataaaagacgaaagaagggataaattatggaacagtttggaacagcgattttgcttgcacttgcagcaatgcttgcaaatggagaatatttatttggttcatcgatgctatcaagaccacttgtgacttgtacgctcgccggcctcatcatgggcgatgtacaaatgggaattattatgggggcaactttggaattagcttttgtaggatcgttttctatcggtgcatccattccaccagaaattatttcaggaagtattttaggaactgcctttgcaattgcaactggtgaaagtacagccgtagcattagcacttggtattccaatcgcctctttagtacttgtcgtaaaaaatctatgctttattttcgtactaccatactttgttcataaagcagataaatacgcactcgagggaaattcaagagggattagccgaatgcaattactaggtgggtttttatcaattaacttaccaatcggtatcattgttgcaacgtcctatttagttggaagtccagtgattcaaaacgtacttgatgccattccagcttttgttatagccggcctaggtatcgcaacaggtttactaccagcatacggttttgctttgctactaaaattaatggtcaacaagaagaatgcagtatttttcgtatttggctttgctttagctgtttacttgaaagtacctgtaactggagtagcgattttcggagcttgtttagcactaattttaacaggttatgcaactctaaaaaatgacaatggaccaacgaacaataatacagagccagcacttgcgaatgatggaggtattaactatgaagatgaagaattctgatgtattaacaaaaaaagacttaatgaaagttttctggcgttcgttcacgatggaatggtcatggaactatgaacgacaatctaacttaggttacggcttttccatgttaccagctttaaataaaatttttaaaaatgataaagacaaacgaatttcttcttatcagagacatttagaattttataatgtaacaccttggctttccacttttccactcgggatttcgattgcgatggaagaacaatcagcgaaagataatgattttgacacggattctatcaataatataaaagtagctttaatgggaccgttaagcggaattggtgattcattcttttggggcactttacgcgtaattgcaacaggtattgggacctcacttgcgcttcaaggtaatatattaggaccgattttgttccttcttattttcaatattccagctattctgacacgttattatggattattcatcggttataacattggagctaattttattgaaaaaattcaaaagactggtttgatggataaactgtcatacggcgcttctattataggtcttggtgtagtgggggctatggtcgccacgatggtaacaatcaatatgccaatgaaattcggttctggcgacgaggctgttacaatccaaagcgtttttgatggtattgttccaggcatactcgcactcggcttcactttctttatcttttggttagataaaaaaggtctaaaagcgcattggattctgcttttaattgctggtattggtattttaggagcatttacaggtttattaaaataagtaggtgaaaaaatgaaaaatatggattactatatccggtcagaacaagatgtttatgaaaatattatccaaaatcggaaggaacttttacaaaacatcattcaaatgaagcatgcggactatgaagctatcgtaatttttgcaacaggctcaagttctaatgcagcatttgcggcacagttatatatgtcggcgaaactagctataccggtttatgtagaagaaccatctacagcagctaactacatgcttcatttaaacaaaaacacattatatatcgccatatcacaaggtggacatagttattctaccatccatcttgtagaagaaatcgagcgtcagggtggcaatgttttcacattaacgagtgatttaacaagcccaattgcaaaagcaggaacgcatacgattgaccttggaatgggcatagaagagatgccttatgtcacccttggatacagcgccacgatcttaatgctaaatttaatcgcactcgaaatggccttattgcaaacaaaaattacagaaacaacctatcaatcggaaatagcggaattacaaaaaatcaccgctcatttaccaaaagctatcgcacaatcagaaaaatggattgaagcccattttaatgaattaatggaagcggaacgaatctttttcattggatatggtgctacttatggcgtggcgcgtgagggagaaacaaaagtaacggaaaccatccgaattacctcttttggaaaagaattagaggaatacatgcatggcccttacattggattatccgaccgtgactatatcattttcattgagccacatggtttgttagaaaatcgtgcggacaaacttaaacaatttttaaaaggacatgttgagaaaatccgaacaatctatgcgaacactggtggtgaaagtacggatgatttattactcggcttaaatacagctgaactgctaacaccgctatttatgacaatcccagttcacttattatcttttaaaatttctaaggaaaaggcattaatttagaagtatcagctttcccggaatttgaccaaataactaaatctaaaatttaatcaaagaaagtaggaatgagcagtgctaaaatttgatgaacaaaaagtaagagaaaatatggaaggggcgttaaaattacgcccgcaaattaatgaagtagttgaccaaattcataaccgaggatttagcaatatttgctggcttggcattgggggaacctacgcatctgcaatgcaagctgttgtgcatatgaaagaaaaaacagcattagaaacgttttatgagaatgctgctgtatttttaacaactggcaataaacgcgtcacgaaagatacgcttgttgtcatttcgtcagtaacaggaagcacgcaagaagtagttgatgcagtgaaaaaatgtaatgaaattggcgcaactgtttttggatttattgataaagcagaagcagaactagctactttagtggaccacctaatttcatatccgttaaacgagcaattgaaattcttcatggtagcagatcgttttatgtacttagcaggtgaatttgatgattacgatgcgttttatcaagaaatggatcaacattttgctaaagggattgtcgaagtagaaaaagctgctgataaatttggacaagaatttgctcttaaacaccaccaagatgacattcattattttgttggcgcggggaaccagtggggcgcaacctattcttacgcaatgtgctactgggaagaacaacactggattaaaacgaaatcgattgaatcgcatgagtttttccacgggatgtttgaaattgtggaacgcgatacaccagttactatttatgtgacggaagatagccagcgttctttaagtgagcgagtggttgattttattccacaaatttgcgctaattatacagttattgatgcaaaagattacgatatgccaggcatttccgctaaattcagaggggctttatcgccatttattatccacgcggttaataaccggatcgatgtacatgtggaaaaaattaactgccacccaatggaaatcagaagatattatcgtcagttagactattaaaaaggcggtttagaaaatgaaagcaatttttgtttgtacccatggaaacgccgcaaaagaactcattcaatctgctgagatgatttgcggtaaacaagaaaatacaagttttgttccttttgaagtaaatgaatctgcggaaaatttgcagatgaaaatagttaatgaggtagctaaacttgatgtatcagaagggcttttatttctaactgatttaaaaggcggaaccccgtttaatgtcctcgttcgattacttgaaaactttaatgaagtggaactagttgcaggtgtgaatatacctcttttattagaagcattcctaagccgggaaatgctacctttaaaagaactagcgaatcaagtcgccgaaactggccgactaggaatttatgaatatgccgcgccgcttgaagaaatagaagaagacttttaagaaaaaaagacagccgcggctgtctttttttttatcttccctctcgaactatcctccttcatacgttatactaaaaagaaaaagatggagggatgaaatggataaacaaaaagaacagctgagtattgaggttgcgagactttattatcaatccgatctcggtcaacaagaaattgccacacgtctaggtgtttctagaccaactgtttccaggttactccaaaacgcgaaactaaaaggatatgtcaaaatcgaagtacaagatccattttctaaccttaccgaactagcaaacgcattaaaggaaaaataccaacttaaaaatgtcaccgttgctttcagtcaaaccaatgactatagtgaaatctctaaacaaattagccaaagtgcagcagaatatttagaagaaattatccatgatgacgatattcttggtgtgagctggggaacaaccatgtataagattgcccaaaaactttcaccacagaaagctgaaatcaaagtcgtccagctaaaaggcggcgtgagtcattcagatgtcaatacctatgcggccgaaacgcttgctcttttcggtgcagcctatgatacagcaccagtatcgctcccgctccccgtcgtcctagataatccacttgcgaaacaaatggtggaagctgaccgtcatataaaaaatatcatcgaactcggcaaaaaagctaatatcgccattttcacagtagggacagtacgcgaagaggcactacttttccgattaggatacttttcagacgaagagaaaatccgcttaaaagaaaaagctgttggcgatatttgttctcgatttttcactatcaacggcgaaattgctgacgaaaaaatgaatgaacggactatcggcattgacttacaagatttaaaacaaaaagaaacagctattcttgtcgcaggcggagaacggaaaataaaagcaattcatggcgcgctccgtggcggttatgccaaccattttattaccgaccaatatacagcaaaacaactacttgaacaaaatttcagcaattagtttacaaatgttctttagtgcgatatgataaagtcaaatccaattttaaaggagtttttataatgacaattgccaaaatgatcgaccacactgctttaaaaccagacacaacgaaagaacaaattttaacattaacaaaagaagcaagagaatatggttttgcttccgtatgcgtgaatccaacttgggtgaaattatccgctgaacagctttcaggagcagaatccgttgtatgtacagttatcggtttcccacttggagcaaatacaccagaagtaaaagcttttgaagtgaaaaatgccatcgaaaacggcgctaaagaagtggatatggttattaatatcggcgcattaaaagacaaagacgatgaattagtagaacgtgatattcgtgctgtagttgatgctgccaaagggaaagcattagtaaaagtaattattgaaacttgcctattaacagacgaagaaaaagttcgcgcatgtgaaatcgctgtaaaagcaggaacagacttcgttaaaacatccactggattctccacaggtggcgcaactgccgaagatattgctttaatgcgtaaaactgtaggaccaaacatcggcgtaaaagcatctggcggagttcgtacaaaagaagacgtagaaaaaatgattgaagcaggtgcaactcgtatcggcgcaagtgcaggtgtcgcaattgtttccggcgaaaaaccagctaaaccagataattactaattttggatgaaacccctttattattattcttaaatgtggcaaaataaggagaatagataatctgactgggggagtttaaatggctgcaactatccgcgaaatagcagaaaagacaggcgtttcaattacgacgatttctcaaattttgaatggtaaaggggaacgatttagcgatttaacccgtgaaaaagtcctgaaaacagcaaaagagatgtcttacaaaccaaactttttcgcaaaaaacatgattgttagtcatacgaacacaattggaatgattgtcccggaagtaaccgatccatttttttcccaaatggtcaaaggggcagaagattacttaaataaagaaggttatatgattatgctctgtaactcttctaatgataaagaacgagaagatttatacgtagaagaattattacaccgggctgtcgatggcttaattatcgccagccctaatattctgctctctggtgttattaaacgcatggaagagaagcggtcgccgtatattttactcgaccgtcagcgcaatcctagacaagaaggtaatatcgcaattgatgatttcaaaggcggctatatggcaaccgaacatttaattgaactgggtcatacgaatatcggaatcatcatttctgatacatctttttataacgtacatgaacgctatgaaggttatttggcttgtatgaaagattatcaacttactgtagaagatggctggattgtgagcggggaccaaacgatgcacggtggctatatcgcctcgcaaaaattactgcaagaaaatattagcgccatttttgctaccaatgatctaatggcaatggggacttaccgcgcggcattagaaaacaatattcacatccctaaagaactaagcgttatcggatttgatgatatagaactttccgaatacatgaccccgccacttacaaccattcgccaaccagtctatggtattggcgaaattgccgcagaacttttactaaaaaatctccaaaatccaaccgagaaattagagaaccgcttacttgatatttctctaatcgaacgcagtagtacaaaaagtattgacaagaagtgagcgagtacgatatagtgagcatgttaagcacatgttcttgtttagtaaaacggtttacttaaaaagtgtaaccgttctcaataaaggtacataaaatgctaaagtggacaaaaagaaagggtgaagagaaatgagaatggtggatattatttccaagaagagggacggcaaagctttatcaacagaagaaattcagtttttcattgatggctatacaaatggggaaattccagattatcaagcaagtgctctagccatggcaatctttttccaagatatgaacgatcaagaacgcgcagatttaacaatggcaatggtaggatctggcgacacgattgatctatctgcaatcgagggcatcaaagtcgacaaacatagtactggtggcgttggtgatacaacaacacttgtccttgctccacttgtagcagcagtaggtgttccagttgccaaaatgtctggacgcggcctaggtcacactggaggcactattgataaattagaatccatcgaaggtttccatattgaactagataaaaaagatttcattaacttagtaaatcgcgacaaagtagctgttattggtcaatcaggtaaccttactccagctgataaaaaaatgtacgcgcttcgtgatgtaacaggaaccgtgaactctattccactcattgc

SEQ ID NO: 7 - DNA, 319630 bp, Listeria innocua
  misc_feature (1)..(end): n can be any nucleotide: a, g, c or t/u
atgtcaaaatgacaacattaatagtagttattgtcagagtatttttgttggctacggaagatttttcaatttctccgagaaaaaaggatctaaatccgcctatgctgtgtcagatttaaatttacgatctagcaataactgggatagttcagtagctggaaaagttccacaaggcgctaaagtatctattgacttagacagtgataagaatggttggtgtatggtaacttataataatactaaaggttatatgttaaatacaactaattatttctccgatacacctgtgataaaaacatactatgccaaggataatataaacttaagaacgaaagcaacatgggatagcgatgtagctcaaaaagtacaaaaaggtgaaaaagttactgtgaaccttaaaactaatgtgaatggttggtatcaagtaacatacggcggaaaaacaggctatatgattttaaataataattacttagtagaaaatcccttgaatatggaaacgtattatgcggttggtaccttaaatctgcgtagtgcagcaaactgggatagtagcattagcttagttgtaccagaaggcagagctgtaaaagtagaaatggatacaaatagtggtccttggtataaagtaacatatcaaaaccaaacaggttacatcccactaacagatgattatttatccaaaactactgttctaaaaacgtattacgctaaagataatttaaacctaagaacaaaagcaacttgggatagcgacgttgctcaaaaagtacaaaaaggtgaaaaagtaacagttaatttaaaaacaagtgtaaatggttggtatcaagtaacttatggtggtaaaaaaggttacatgatcttaaatgataactatttagtcgaaaaagcgcttaatatgaaaacctattatgcggtgagtagcttaaatttacgtagtgaggcgaaatgggatagtagcataagtcaagtggttccagaaggtagagctgtcaaagtcgaaatggacacgaatgttggcaattggtttaaagtaacctatgacaataaaacaggttatatgccactaaatgatttatatttatctgaaaccgctgtgttaaaaacctattatgcaaaagataatttaaacttacgtagcgaagcaaaatgggatagtgaagttactcaaaaagtagaaaaaggtgaaaaagtaacagtcaattcgaaaacaagtatcgatggctggtatgaagtaacatacggtggtaagaaaggctatatgattttaaataataattatcttgtagcagaaccactagatttgaaaacatattacgcagttaacacattaaatttacgtagtgaatctaaatgggacagcagcataagccaagtggtacctgaaggcgctaaagtaaaagttgaaatgaacacaagtgatggtaattggtacaaagtaacttatcaaaataaaacaggttatatgccgctaaatgatttatatttatctgaaactgctgtgttaaaaacttattatgcaaaagataatttaaacttacgtagcgaagcaaaatgggatagtgaaatttctcaagtagtagaaaaaggtgaaaaagtaactattaattcgaaaacaagtataaatggttggcatgaagtaacttacggtggtaaaaaaggttatatgattttaagtgataactatttagtcgaaaaaccattgaacttgaaaacgtattatgcagtaggagatttaaatttacgtggtgaatctaaatgggatagcgacatagttcaagttattcctgcgggtactccggtaaaagtagaaatggatacaaatgatggtatttggtacaaagtaacgtatcaaagtaaaacaggctatatgccactaacagatgattatttaactttaacagcaaaataaaaaaagaactcctctaaaactttttagaggagtttttttattaattttccgctgcttcaatctgttctaacatatccggtgtgcttaaatcgcttctaagaaattctgttgtttgtggtaactgaagttcgaattcagtttgttgtgcgacttcaacagtaccttcaagcatttcgtaatcaaatacgtgaccaccgattttgcgcatatcatcaataaaatgtacgtgatagccggaaaccccaataccactaatataagcaggtgtccaaaaaccaacaattgtaccagtaatatactcaaagtgatacgttggctgttccttcaccgcttcaataagtggcggatatggtctttgttgttttggaacaacgcgagtgtccacataacggaaattcccagtcattttcaccgcgtaaaaaacgttcggtccttgcactaattcggcgattttttcttccacagtttgtttagaagtaggttctgaaacagtaaaagacgtatcggcttcaaaaaaagtagtgctcgcataaggtgttgtgtcttccggttttactttataagcttgaccgtccgagcgtatttgaaaagcttccccatccaaaataatcagttcgccatcaaattggtcaagcgttcctatgccgaggtcaccgtgttgtagtaattctttaaaacttgtcgttccgctaaaaagaccaccaacaagtgctgccattgtagaatgctgaaataatcgattttttcttactgtgtccatcattgccactccttgaattgttatatataaaaagttgtttttaaataatacagtctaatttctatatgttcattatactactttatatccttaaacaaaagattttaaaccagttttcaaaataaactgttactataacagacagataaactgtaatataaataggctcccgcttcatgcgagaacccattttaaacaagtaatgtgtaaagtgtttggttatcattaatcggtatataactcggatcaaaagcagcaacccggtcaagcaagccttcataatcattcttatcttgtaaaagtacaccgatgataacaggtccattgcctcgatttacttttttcgtatattcgaatttagtaatatcatcatgcggtccaagaacatcatttacaaactcttttagagcaccagggcgttgagagaagttgacgatgaaataatgttttaatccttcatgaagtagggaacgctcttcaatttcttgcattcgattaatatcgttatttccgccactaacgatacagactactgttttatctttgatttcctcacgataagtttcgagagcagcaacggaaagagcaccagctggttcggcgacaatcgcttgcttcgtatacatatctaaaattgttgaacaaactgctccttcagaaacggttgtcacttcatcaactaagacttttgcatgctgaaatgttaaacttccaacttctttcactgcagccccgtcaacaaatttatcgattttatctagagtcacaacttgattttgttttaatgcttctgtcatcgaaggcgcgccagctggttctacaccgataatttttgtgattggacttttcgcttttagataagatgccacaccgctaattaagccgccgccaccaatacctgcaaaaacataatccgcttgctcatgtgctttatttaaatcttttaccatttcaaccgcgagcgatccttggcctgcgataatatctggatcatcaaacggcgggataaatgtctgaccatgttctgctgcgaattcttttgcggcagtagcagatgcatcaaacgtgtcaccaactaaaacaacctccacattacttccaccgaaaaatttcacttgcgatactttttgttgtggggtagtagttggcatgaaaatcgttgccggaaccgtcatacgtttacaagtataggcgactccttgggcatgatttccagcgcttgcacaggcaactcctttttctaactgttctgctgacagtcgagaaatggcataaaaagcaccacgtaatttaaaagaacgcacccgctgtaaatcttcacgtttcaaatatacattgcaatgatatttttctgataggtaaaaatcgtattcaagcggggtatgcttgacaactggttttaatacatcataggctttttcgacatcttcttctgtcactaataaatcaactaactccatcatcctcactaccttttcttatatggaatccactttttgctcataggctttaatcgcgtcaatatgttcaaaagtaatcgcaatatcatccagcccattaataaatttatttttccatgtagcatcaatctcaaatgggtaggtaccaactgaactaatgacttgttgttttggcaagtcaatcgtcactttttcctcggcagtgattttcgctaatttttcacgggcttctctaggaagaacaataggaagaacgccatttttcgtacaattcatataaaaaatatcactataacttccagcgataatcactcggaaacggtaatcaagtagcgcccatgcggcatgttcacgagaagagccgcaaccaaaattatctcctgtaattaatatcgttgcttcttgacggtcaggagcattgagcggaaaatccgggtttggtttccgattcggaaggtagcgccaactatcaaatagaaattcgccaaaaccagtccgttcaattcgctttaggaaactttttggaataatttgatcggtgtcaatattatcgttcattagtgcaactgttttaccaatgtgtactttaattgcctccactaataaccgcctcctttcgaatatcgataaagtgtccgttaattgccgccgctgcagccattgctggtgaaacaagatgggtacgtgctcctttaccttggcgcccttcaaaattacgattcgaagtagaagcgcagtggaccccgtctggaacttggtcgggattcattccgagacacatcgaacaaccaggttcacgccattcaaaaccggcatctttaaatatcttatcaaggccgattgcttctgctgcattacgaacttggcgagaaccaggaacgactagtgcccgaatattattttttactttatttcctttaacgatacgagctgcttcttctaaatcagacagccgagcattcgtacaagaaccaataaacacataaccaagctcgatttcttctgcagtttgaccaggttttagtcccatatattcataagctcgctcatagttcatatctttaatttccggaaatgcttttgaaaaagggacacccatctctggatttgttccccaagtgacatatggttctaaaatgctagcatccatttcgatatgaaggtcatattccgcatcaggatcagttttaagcgtttcccaatcacgaatggctttttccatgtcagaaggagcatattcacgaccacgaacatattcaaaagtagtttggtctggcgccatcatgcccatttttgcgccaccttcaatagccatattacaaatcgtcatacgttcttccatcgacatattgcgaatcgtttcgccataatattcaaccgcataacctgttccaaaagcgacgccatatgtggcaatcaaatgcaaaattatatcttttgcataaacgcctttgggaagttttccattaatttcaatacccatagattttggtttttgttgccaaatagtttgggtcgcaaaaacatgctctacttcactggaaccaatcccaaagccaatcgcgccaaaagcaccatgtgttgcagtatgcgaatctccacatacaatcacttttccaggttgagtaagaccagtttcaggtccaaccatatgcacgattccttgacggtcgctacccatatcagctagtgttaccccgaattcttcgcagttagtttgtagtgcttcaatttgctttttagcaactaaatcttgaatgttgaaaatgtcttcagtgggaacattatgatccattgtagcaaatgttttatctggtctccgcagtggtcgattttccattctaagtccttcaaacgcttgaggagaagtaacttcatgaatcaaatgaaggtcaacatataataattgcggttcaccttctttaccataaatgacatggcggttccaaagtttatcaaaaagtgttttccccattttattctcctccttcaatttgttttagaacttcatttgtaaaatcggttgtggaagtattacctccaagatcagcagttaaaaatccagcttgcatcgttcttgctgtagccgcatcaatcgcatctgcctctttaaaaagtgaaaaagattgacggagcatcattgacacagaagaaatcattgacattggattggcgatattttgattagcaatgtctggtgcagatccgtgaattggttcgtataaagaaggtccattttcagcgtgactagcagaagggagcatcccaagtgatccagtgataacagatgcttcatcgcttaaaatatcaccgaataaattttccgttacgattacatcgaatgtcgttggccgctgaatcattagcattgcagcagcatcaacgtacaaatgctctaatgtaatatctggatgacgacttgctacttcttcagcaattttgcgccataatttacttgaagctagcacatttgctttatcaacagaagttacttttttatttcgtgtcgatgcaatttcgaatgctttttcaataattcgttcgatttccacgcgagtataggttaaagaatcaacagcagccacatcatcccaatgtttcggttccccaaagtaaagtccaccagttaactcacgaacaacaacaaaatcagtattttcaacaatttccttttttaaaggagaaaggtgtgttatcgaactagggacttgaatagggcggatgttagcgaaaagaccaagcgcttttctaagtgcaagtaagccgtcttcaggtcgtttaggcgcattatcccacttaggaccaccgattgccccaagtaaaattgcgtcggcattttggcatgcttttaaagtttcaggagggattggatcaccagctgcatcaattccggctcctccaaaagggtgcgattcaatttcaaatgtatgattgtatttggcagcgatagcttctagtattttgattccggaagccataatttccggaccaattccgtcgccagctaaggaagtaattttatatgccacgttactttacctcctcgaaatcagcttgcttacttgtagatttgctttttccagatgcttgcaaataagctttagcactagctgttaaaacatcaaaatcgataccgataccatggaattcagtgccattatcatctttaatgacgacatggacttctgcttgggcatcttggcctgctgtaatcgcttgaatacgataatcggttaattcaatatcttgtttcattagtcggttaatagtattataaatggcttcaatgcttcctgagccagttgctgcatcttctattaacgcgccatcacgttcttcaatccgcacgatggcaccttggacaccgccagtaacgtactgtacttgtaaatgttttaattcgaaagcatcatgagattcagaagattgaccaagaattagcgcatgcaagtcttcttcggtcacgtctttttttgcatctgcaagctgtttgaaacgtttaaaagcatctttttgttcttgttcactcagcgtataacccatttcttccattcgtgtattgaaggcatgttttccagaaagtttgccaagagggagggaatttttatcaacaccaacaagagcaggggtgatgatttcatacgtatctggattttttagaacgccatcttgatgaataccggattcatgtgcgtatgcatttccacctattacggctttattacgaggaactggcataccagacaaacgactaattagatcacttgagtttttaaattgattcaagacaatatttgtttctgcttgataaaaatctttgcggatgtgaagtgcgacggcaacttcttctagcgccgtatttccagcacgttcaccgataccgttaattgtaccttcaacgcgtctcgcaccattttcaattgcagcgagcgcgttagccgtagccattccaaggtcatcatgacagtgggacgcgaaaataatatcatcaaactgctttatttcccggcgcaaatcttgaaacaattgtccgaattcagttggattagtgtatccgactgtatctggaatgttaataacggtagctccagcatcaatcgcggtttgaactgcttcaataagaaaagcacgatctgagcgcgttgcatcttctggtgaaaactgtacaacgtcaaatttttgtctagcataactaatgtggtgtttaatggaagcaagaacttccgcccgactcatttttaatttgtattccatatgcacatcgctcgttgctaagaagatatgtatttgcggggaaactgcgtctttaagcgcttcttccgcgcggtcaatatccgcttcaacacagcgtgctagccctgttacagaacaatgtttaatcgcttttgcaattgccttgacgcattcaaaatctccaggagaagaaatcggaaagccggcttcaatcacatcaattccaagtttttcgagttgtaaggcaatctggattttctcctttacgtcaaaattaactccaggggtttgttcgccatctctaagtgtagtatcaaaaaactggattttcttcattcgatttcacctcttgttttatattagatagggaagcgtggatttttcctgctttcagtatcagtttagggaagaaacacgttcttgcttaaactcatattgaaaaaggataaacggttgctaggcgaaaaactcgcctagcaatccgcggtaagtattaatgttgtggttttacaaatggcatcatttcgcgaagttctgcaccaactttttcgatttgatgaccttgttgttctttgcgcattctatggaactctttaaaaccatttttattgtcgtcaatgaatgatttagcaaagttaccattttgaatgtcggtaagtacttctttcatggcttttttcgtatcggctgtaacaacacgagggccggaaacatagtcgccgtattctgctgtattagaaatcgagtggcgcattttttccataccgccttcatacatcaaatcaacaattagcttcatttcgtgtagtacttcaaaataagcaagttctggttggtagccagcctcaactagtgtttcaaatccagcttggataagatgagtagcgcctccacaaagaactgcttgttcaccaaatagatccgtttctgtttcttctttgaaagttgtttcgataacgccagcacgagttgcgccgataccttttgcgtaagaaagagctgtatcacgtgcatttccagttgcatcttggtaaatagcgaatagggaagggacagcgccaccttcgacaaaagtacggcgaactaagtgaccaggaccttttggagctactaggaaaacatccacatcgcttggaggattaattacgtcaaaatgaatattaaaaccatgagcgaaaacaagtgcattgccagcttttaggttaggcttgatttcattttcatacgtttcaccttgtgtttcatctggcaaaagaatcataataacgtctgctttttcagctgcttcactaacagaataaacatcaaagccatcatttctcgcagattcggcagatttaccttcgcgaattccgataataacgttattgccattgtcacgtaggttttgagaatgcgcatggccttgtgaaccgtacccgattactgctactgttttaccttctagtgcgttattttttactgcatcttcataataaacttttgtcatttttcctaacctccaactagtttctttttatatttcagaagagcgagatgctattctgatgctagcaaagcaacgaattgctctgtagttaatgatttcagcccatttttttaggacttcttgtaaagccagttacacctgttctagccatttgtttaatgccatatggtcgaactgtatcaacgaaagcatcaattttttcgcttgtaccagttacttgaatgacgacatttttagtaccgacatcaatgacggtggcgcgaaatggttcgattactgcgtttagctcagaacgtaaagcagcgggggagttgattttgagtaaagctagttcgcgttcgatgtgcgcatcgtcagtaatatcacttactttgagcacatcgatttgtttgttaagctgtttggttacttgttcaatttcgtatagtgagtcgacatggacgacgatggtaatccgagaaacattcgggatttcggtccagccaacagagatactatcgatattatattggcgtctggagataaccccagtgatacgatttagtacgccagatgagttattcactgtagcagtaatgattcggcgcatttattccactccttccatttggtgatttggtttaccgcttggaaccattggaagtactagttcatcttttgcaacatgaacatcaatgacaattgggccagggtgcgcgaatgctttccttaaatctttttcaagcgtttcaggattcgtcaaacgaacgcctttaaccccatatgcttcagacaatttcacaaaatcaggttgactcgtgaaaatcgaatgggaatatctttcatcgtggaatttttcttgccactgacgaaccattccgagagatccattattgataatgactgtttttacattaatctgataatcgtttaaaattgctagttcttggttagtcatttggaaaccaccatcaccaacaaccgcgactactgttttgtcagggaaagcaagttgtgcaccgaccgctgctggaaatccaaagcccatcgtgccaagaccaccgcttgtaataatttggtgatcaaattggaacggatagaactgagctgtccacatttgatgctgtccaacatcggtagaaacaagcgcctcaccttgcgtaatttcaccaataagttcaattacacgctgtggtttaatttccgcttttttcgtcctatcaaaattaaaaggatgacggtttttacgagtcatatttaatttgtaccaatgtgatgtatctgggtgaaccggtagttccatttgtaacagttgtgtgagtgtttcattaatgtcggcaacaattggaatttgggtttcgataattttgccgatttcagcgggatcaatgtcgatatgagcaatggttgctttcgtagcaaaatcttttggcgcgctagcaaggcgatcatcaaatcttgaaccaaagttaatgagtaaatcgcagtcagttaacgccatatttgctgcgtaagaaccgtgcattcctcccataccaagaaataaatcatggttttgcggaaaactgccaagaccgagcagtgtattaacaacaggaatttgataacgttcagcaaattcgagtaattcagccgtagctctagcatggtttacaccagctcctgcaagaataagaggcttactacgagcggaaagagcttgcattaatttttcgagttgcagtggattaggtgaataagtcggttgataacctggcaagtcaatcgtatcaggacgaaccgtatccgtttgagtaatacccatatcttttggaatatcaacaacaacaggacctttacgaccagtatttgcgatatgaaaagcttcgttgacaatttttggtaagtcacgaacatcacgaacttggtagttgtatttagtaattgggatggtgagtccaatcatatctgcttcttgaaaagcgtcttttccgataccaggcgtatgaacttggcctgtaaaaataactaaaggaatagaatcactcatcgcatctgcaataccagttaatacatttgttgcaccaggtccactcgttacaacaacgacaccaggtttcccagttacgcgggcataaccttcagcagcatgaatcgctccttgttcatgcctcgttagaatatgcggaatatcacagtcataaaaggcatcataaagaggtaaaacagcgccacctggatacccaaaaatcatttcgacttgttgttttttcaaggagtcaattaaaagttcagctccacttttatttagcttttttgtcgctttttcatttgtcttcgtcgtatcaatcacgcttatcacctcatttttttagtcgattaaatcttctggaatttgcaaaataccaccagtgtgagcacttgttacgagtgcagtatatcttgcaagataaccagtttttactttggctttaaatttcggtaattcttttcttctttcttctaaaacttcatctggaacatctacatttaacgtccgatttggtaaatcaattgtgataatatctccgtcgtgaacaagtgcgattggaccgccagcagcagcttcaggagaaatgtgaccaactgcaatcccgcgtgttgctccggagaaacggccatctgtaatgagtgcgacgtctttacctaaaccgcggccaacaatactagatgttggagctagcatttctggcattcctggtccgccttttggaccttcatagcgaataactactacatgaccttcgcgaaccgtatgattatcaatggcttcaactgcctcatcatgagaactaaagcaaatagcttcccctttgaaaacttgtacggaaggatctacaccaccaactttgatggttgctccttttggtgcgatatttccaaacaacatggaaagtccaccaactgggctataaggattttcttttggatggataacatctgtattattaatttttgcatcagcaacattttctctaattgtcttcccagtaactgttatgcggtctggatgaatagcgccaccaagatcaacaagttctttaataatagctgaaacaccaccagcttcatgaacatcatgcatcgagtaagaagaagaaggggcgattttggaaaggtaagggacgcgtttagcgatgtcattgatacgttctaaatcgtaatcttcaatcccagcttcatttgcaagggcgagtgtatgtaaaacagtatttgtagagccacccattgccatgtctagagcaaatgcatcatctatcgcatctttagtaataatgtcacgaggacgaatatcttttttcactaaatccattaaatggaatgctgactctctaataagttctcggcgtgcatccgaaacagcaagcgttgtaccatttcccggaacagccataccgaggatttccattaaacagttcattgagtttgcagtgaacattcctgcacacgagccgcaagtcggacacgcgtttgcttccatatcaaggaaatcttcttgtgacatactgccttctttaaaagcaccaaccgcttcaaaaacggaagaaagagtaagggcttttccgtgagcagataatccagctttcataggaccaccagaacagaagatagcaggtacatttgtacggacagaagcaagtagcatacctggtgtgattttgtcacagtttggaatgtagaaaacaccatcaaaccaatgtgcattaatgacggtttcagcagcatcagcaattacttcacgagaagggagggagtaacgcataccgatatgtcccatagcaatgccgtcatctacaccaatcgtattaaattcaaatgggataccgccagcttctctaatagcttctttagccacatccgcaagttctcgcaaatgaacgtgacctggtacaatatcaatgtaagagttacaaatagcgataaatggtttatccatatcacctggacttttgatttgacctgtggcatgcagcaaacttcttgctggagcctgttcaacaccttttttaattttgtcactacgcatatgactttaccccatttctaattaagaattatttgccgacgctgaatttttagaatttgcaaaatagcgtggcattaatatatatgaataagtagttgcttgcttgatagttacttttctatgcttaaaccttgaaatctagctaaagaaaaagcaccccaatgatgaaaacaatgggatgctttgccagaatcccatttaacgtaaacaggactcaaactactgtaaatttctacagtgctcaaagtccttttagagtaataaaattgtaatgactgatttggtcgttttcataagtcattatccccttcgttaaatggttttagatttccgattagtcgcacatttttgaaaaaaattaatatcaagaaatgttatgttattatttaatatatatggttgccatgcgattgtcaattgttattttgaaagttttccgtcagtttgcacaattcaagcaacttactcttttatactaaattagtacctggtcttatatttgacttataacttaaatggaagcgcattcaaaaatgaaaggtcaagtatatagtcagaatagttttatttttatagttttactcgaattaattaatattttggataaaaaatcacacattagttgcgtttttatagcaaattctgctaaattgaaagtaataaattagtaggaaagtcaggtttttgctgtggataatttggaaacagatcgattaattttaataaactacacattagaaatgattcaagcaacgataaatgggacagaagctttagaaaaaacaagcggctaccacgtgtcgcctgactggcccggaattgatttctttttttatttgccatatgtattagaaaatgtaaaaaaagacgataaaatgatcaaatggacacgtttagtcgtattaaaaacagaaaataaaattataggtgaaattggcggacaaggaaacccagatgaaacgggagaaatcgaaattggctacagtattgtcccagattatcaaaataaaggatatatgtcagaagcgctcattagtatgattgattggttagaacatcaacccgtcattaaccgcatatttgctagatgttatgagcaaaacgaagcttctatccaagtactaaagcataatcattttgtacatattaaagaaaaagatactgaagagaaacaaggaagagtgatgatgtgggaatatccaataaaacaaacctgattattatcgcctctggaaaaccaaaaattggggataagcttccggatattggtccagttaaggcaagtgaagtatataccggaacgtttcatcgtttaagtaaagcttatgcggaacagtttgcggataattatttgattttatccccaaaatatggatttttaaaaccagatgatattgttgcaaaaaactatgatgtccgttttacgatgaaaggggtaggggaagacacaattcagcttgatgaactgaaagaacagtggaagcaactacaaataaacccttctgaaccaatcccgatgttaggcggcaaaaaattcagagggttactaatgagtattactgacggtaaacagccattcagttttccacttgaaggtgcgactggaattggtattatgcaacaggagttaaagcaagctgtcgcgacgaatgttccactaaattgtgctaagtagaagaagggcggcagttattagtaaaaacataactcccatattgacgtttttccgaatgaagaaataaatggtttgtagcgccatcaaaatagcgagtgatacagtaataaggtgtagcatagatcgacctcctatatgtttacacggaaaaacttaattaaatagtttacgaaccttctcgagtaacgaggtaggttcttcttcggcgttttcttgttcttccttatacaaatgaatatcttctttattgaccgctttttgacaggcaaggacgagataaatatctgtttcaccttctaaacgactgacgatagaaaattcatgtttacatttttccgctagcttaatgtaagggcgcagagaattatagtgcagtaatccatttaacaaaagcttcgagtcactgttttctagtattgctttttctagttctggaagatattcttgggttaaaacttcttcttttgtgagcgcaactaatactcgttcgcggtaagttcctaagtatttcttcttctcagcgggattaatttcttttgccccatacatgcctttttctaggtagtcatcaatattttcagccattatatgagctcctttaactagttagttttcctctctattctaacatgcataggggtttttgcaagtaaacaaagaaaaccagaaacaggctaaaatagccatatttctggttttttgattaatcgattgggaaccactggaatccgtcacgttggataaggtcgtctgcttcttttggacccatcgaaccggatttgtagttagggaagtggtctttagtatttgtccaaacatctgccacatggtcgataaagttccatgatagcgatacttcatcccagtgagagaagtaagttgcatcaccgcgtaggcagtctaaaattaatttttcataagcttcaggtgtattcataccatctggagaagaatgaatgtaatttaagttaactggcattgtaaccattccttgaccaggttcttttacattcaaatgaagtgtaataccttcgtccggttggatatgaataacaagtacgttaccaccaagcgattgttgttgcccgaataaattcagtggcacatctttgaactgaatagcaatttgggttgttttcttcgcaagacgtttaccagtacggatataaaatggaacaccagcccagcggaagttatcgatttcaagtttagctgcaacgaaggtttccgtattggaatgaggatccacattatcttcttgacgatagcctttaagttctttgccacctacttcaccaggcccgtattgaccacgaataaagttttggtgaacttctttaccttcaaaaacgcgtaacgaacgaagcgcgcgaactttttcatgacgaatctcgcgtgtcgttaagttaattggcggctccatcgcaagtaaagaaacgatttggagaatatggttttgaaccatgtctcgtaatgcgccactttcgtcataataacgtcctcggtcttcaacgccgagcacttctgtcaaagtaacttgaatgttatcaatgtaacgattattccaaagcgattcaatgatagaattggcaaaacgaataaccgagatattttggatcatttcttttcctaaataatggtcaatacgataaatttcatcttccttgaaagcttgacgaagcgaattatttaattcttccgcactagctaaatcatgaccaaatggtttttcgataattaaacgatggaaaccgtctgtgtctacaaaaccttcagatttaatgcggctagcaatcgttccaaagaagttcggtgccattgcaagatagaaaaggcgattaccacctaattcatatttagcgtctaattcatcagacaaatcttttaaagttacataagattctttatttgttacatcatgggattgatagtagaaatgagaagcaaatgcatccgcgtctttttcggaaccgtcaatgtctttgatagactcttttactttatcacggaagaaatcgttactccattcacgacgagccgttccaattacagcaaaattgtcgccaagagatcccttactgtacaaatgatatagcgaagggtaaagtttgcgatttgccaaatctcccgtaccgccaaaaatagtaatcagtgctttttgttctaactcatctgtcatacgtcatttaccctctttcttattctcttaatggcaaaaaattaactgctaagaaaaagatttcttagtttgaaaagaaccccacaaaaaaaggccttattaaatgagctattaattttcctcattagtccatactattttatccataaagaagcatttgtgcaactgtttggttcgaatatttttttaatttgacagttatttctgaattataagggtttttagcatgaaaatgtttatttcctgttcgattaagaatgtgataaaataagacacgaactgggaagggaatggaacaaaatggaacttgtttttttaggaactggagcaggcgtaccgtcgcgaggccgtaatgtcacatccatcgcactttcaatgttaaatgaacgaaatgcaatttggctttttgattgcggggaagcaacccaacatcaagttttgcgaagccatatcaaacttagcaagctagaaaaaatatttattactcacatgcacggagaccatatttttggactaccaggcttattaagtagccgttcttttcaaggtggagactccgatttgactatttatggcccagctggaatagctgaatatgtcgaaacttccttaagactcagtggaacaaggcttacatataaaatcaattttgaagaaatagagccaggtgtgatttttgaagatgagatgtttctagttacagctgacgatcttgaccacggcgtacgcagttttggttaccgcattgttgaaaaagataaacagggcgcacttaatgctgaaaaactaaaggcggacggcgtcgaagcgggaccagtttttcaaaagctaaaaaacggcgaaatcgtaacattagctgatggacgcgtaatcgatggtaaaaattatatcggtgagccacaaaaagggaagattattagtatttttggtgatacaaaagaaactgttagcgaactagaattagcaatgaacgccgatattttggttcatgaagcaacatttgaaggtgataaagcaaaaatggcaggagaatatatgcattcgacaacgcttcaagcggcaaaccttgctaaagctgccaatgtcaaaaaattaattttaacccatatcagctcaagatatgatcgagatgcaagtaaagaactattaatagaagcaaaaactgtttttgaaaatactgaaatagcttatgacttagctgtttttcaagtaggagagtgacaaaatgaacccttttttgaagaataaaacggtattaattaccggggcttctaacggtcttggcgctgaaattgcaagacaagttgctgcgtccggtggcaatgttattataacagccagaagtacggaaaaattactagatttacaaaaagatatacatgataatttttcagtagaagcgacttattttactttagatatgacggatttcgagcaagtgaaacaagtcagcgcagagataaatgcttcgtatcaaatcgacgtattagtcaactgtgcaggttttggtttatttgaaaacgcggtagatattccatttgagacaattgaaaaaatgtttgatacgaatgtactgggcttaattcaactcacacaactgattttaccgcaaatgcaagcacgcaaagcaggacatattattaatattgcttcccaagctgctaaaatagctacaccaaaatcaactgtttactcagcaacgaaatatgcggttttaggtttttctaatgcacttcgtttagaactaatgccagacaaaatccatgttacaacgatcaatcctggcccaattgctacaaactttttcgatgtagcggataaatcagggaactatttagaaacagttggcaaattagtgttacagccagaaaaggttgcgcgtaaaacagtgcaaattatgggaactaagcgccgcgaaatcaatttaccttttgtaatgaatattgcgacacgactttatcaagtaatgccacaagttatcgaattcttcggtaaaggggcatttttaaagaaataaatcagaagaaaataccttatgaaaatagggtatttttttcttgtaattaatgagtttaacctttataattgaataagaacgcttgttcgttttaagggagatgcagttatggatacgagtagaaaaattattcatattgatatggacgctttttatgcatctgtagaacaacgcgaccatcctgagttccgaggaaagccgcttattattggtggggatcctaataaacgtggagttgttgcgacttgttcttatgaagcgcgcaaattcggtgtgcattcagctatgcccaccagacaagccgctaaactttgcccgaacggtatttttattcacggcaatatggctcattatgtagaggtttctaatcaaatccgcgaaatcttttccagatatacggatattatcgaaccactctctttagatgaagcttatttggatgtaactgaaaataaaaaaggaatgaaatccgccacaatggttgcacgtgaaatccagcagacgatttaccgcgagcttggtctaactgcttctgccggcgtatcatttaataaatttatcgcaaaaatcgcttctgattttaagaaacctgctgggattaccgtggttgcacctgaagaagcagaagcctttttagaacaaattcctgtaaccaaattttatggggtagggaaagtgacagcggaaaaattacatcgccttggaatagaaactggagcagatttgaagaagtggagcgaatgggaccttattcgtgaattgcataagcatggctatcagttgtatcgacatgttcgaggtcgttcgaataacattgtgaatccgcatcgtgatcgcaaatcagtaggcaaagaaacgacttttgaatttaacgtattggataaccgcatactcgagcaaagtttaatgaagtttgctaagaaagtggaagaacgtctcattaagttacaaaaacacggcaagacagtagtactaaaattgcgctatagtgactttaccacaattaccaaacggcttactttaaacgaatataccaatgatgcgaatcaaatttaccaagcggctgcattacttctacgagaaagctacaaaggacaagatagcattcgtttgattggacttaccgtaaccaatttaaaacccgtttattttgaaaatttacgtttagaaggactttaaaaaaaggctagcacgatttaagtgctagcctttttgattatttcatttccagtaaacgttctttcagttcttgctccattgtaactagttctttctctgctacggcacgtttagcacggccttcttgttggattttaagtgtttcttgcaaggtttcaattaagctggactgtgtttctttaagtgtttcgatgtccacgatacctctttcattttcacgcgctgtttcgatcgcgtttgtttttagcatatcggcatttcgttttagaagttcgttcgttgtttcagaaacttggcgttgagcggctacggcttgttgttgacgaagcaacgtaagcgcgatggctacttggtttttccaaagcggaattgcagtcataatggaagactgaattttttcagcgagtgcttggtttgtattttggattaaacgtatttgcggcgcttgttggatagtgatttgacgacttaagcgtaaatcatatacacgcttatcaagtcgatccgcaaattgtgttaaatcatttacttcttgataatccatttgatcgccagtttgttctgcttttttgcgaagttctgggagcatttttgtattaatttcttctaattttaattctccagcagcaatgtaaatgttaagtgcttggaagtaatctttatttttatcataaagctgttctaggaaagagttatcttccattaaacgctttttggaatgttccagtttcaacgcgatgcggtcaatttgggtaccaattttttgatatttagaagtaatttcattgatggattgtttaactcggtggaacatttttgtgaagacgtttttgttgcgagcagctagttcatctggatccgcttcttgcaagcggaacattaaatcactaataatatcgccaattggtccaacatcttgcttttgcacatgagctaacatcgagtgagaaaagtcatgcaatttagcttgggcaggtgctccgtaaccaagaatcgctgcttgatttccaggttcgatttgtttggataactctaacgcttgttttttatttgtttcagtaagcatatcaactaggcggggagccgcatctgtttcgttatttacgatacttgcagctgattcgccgtctgatccgaatgggttagctagaagatcatctaatgtttggttaaactctttctccactactaaatcttttaattcatttgtttcttcacttggcttgttctcggtcatcttttgtacccctttcgaatttctttttctgtttggaaatggagtttttcgctacttctaattcaaaatcgagattgtttacatcttgattcaaaagtgtaaataaatccttttcaataacacgacttaaatcatttaaaagtgtgcgtgtatcagaaagcgtttgataaattttcttgtcttttacaggttgtttttctaagaaagcatatttttcggtgagctctactaaagagtcaagatgagagaaaaagaaatcttctgcttcataaaaacgtttaggttcttcttttacaatgccgtaaattcttttagtaagtaaaagtgttttgttgcgctcttggaaagaatatagcgctttgttttgtgtcatgattttttgaaggcggataattttcacacgagcttcttctaagttagtacgaatatatttatattctttcttggttaatccagttgcaatcatttgcgcccggtctccagctttagatgaaaagaaaaataggatagctgcaacagcgataacaattgttgcaattaccaagccactatggataagtgaagtaagaataccacccaaaataatgacaagtaaaatagaacctgtgaatgctaatatctttttaaaaacggtcattatacatcttctcctttaagtacctgtttaaaaggtccgctttttcttaatagtatatttttctaaaaataaagattgatggaatgtaactaccatttaagtatatttagtatgtgagcactaagcaagtagcatggtttttatattttagaaagtgtcctttatttgttcttatcataccatatttagaaaacagatgttatcagtcgtgcgatgtaaattaaactcggacttagttatgttataatgaaaaaaaacgagaagtaggtggcagaaatggactcactagaggaaaaaacgcttcatacagaaaagatttttagtggaaatgttattgaattgcaagtagatgatgtggagttgccgaatggggaaaagagcaagcgcgaaatcgtcaagcatcccggagctgtggcaattatacctttttcagcagatggaagaatgtacttagtagaacaattcagaaagccactcgaaaaaaacattatcgaaattccagccggtaaaatggagccgggggaagatccgctcgtgaccgcaaaacgggaactagaagaagaaactggttttcagtccgatgatttaacatatctcacttctttttatacatcacctgggtttgctagtgaacttttacatatttatgtagcacgggatcttcggaaaatggaacaccctctagcacaagatgcagatgaatttattaatttagtcaaagtaacgatggaagaagcagaacagttaatagcacaacaattcattcatgacgcaaaaacaatgtacgcgatacagtactggaaattacaactattaatagaagaaaacgaataaaccggatgaaaaacttctttgggaatacttggcataaagaatggaaatatgttatcataaacatgaaaagagagccatgcaagaacatgaccctcaaatgtaagccccatttaaggtggcagctagtctaatatggtataaaaataaccactaaactcgccaaagtttatgagtggttatttttttgtgttattttgactgtttagtaacaacactaaagttgtaaaagcaactgcaaaagagagtgcttcataaacggtcatgggttatcctttccaggagttcctaacaaaaaagtcataggcatccccctttcttgttgaaagagctagccaccaccataaacttgctatatcacctggaacttagttattctatccgtaataaagcgattattgaaattagtattatcaagctaaaagtggaattttaaagactttagatagcatgaaaaacagtaatttggatactattattgattatagtttttgattgactacctggtcaaaagtggttatactcaagttgactaagtggtcaataaaaaggtggaggagagaacatggaagcaattaaggtggaatcactcacaaaaaattatcataaaaaacgagcaattgaaaatgtgaatttgtcggtaaatgaaggcgaattatacggttttatcggtccaaatggagctgggaaatcaacaactatcaaagtcttattgaattttatttatgcaacgagcggaagtgccacggttctcggaaaagatgtagtgaaacagtcagcagagattaagaaaatggtcggatatgtccctagtgaagttcgctattatccacaaatgactgcaaatgatattatccactatgctgctaaattccatcaaatcaaaaatgcaacacaaaaaatgaatagatattatgaaatgttttcgattgatccgaaaaaacgctttggtgaaatgtcgcttggaaataagaagaaagtagcgattgttgctggacttattaccgaaccgcaattattcattttggatgaaccaacgaacggccttgatcctttgatgcaacattatttatttaaagaaatgaccgagcggaataaagaggggatgacgatttttctttcaagtcataatttacgtgaggttcaagaatactgcacgagagcggcttttattcgaaacgggaacattatcgcggtggaagatattgccaatcagcaaatgactggcaaagtgattgcactcaaagggacgaatttgccccttgaaaaattaacgaatgcgggtgcaagaattatcgaaaatgaaacaggcaaagcacgacttatttttgatgatgatattaaaacaattttgccactattacaggaaaaagaaattacggatttaacgattacaaatcaggaattagaagataaatttatgacactatatgaagggggagaaatcaaatgaacatcttacacattgaatggaaaacaagaataaaaagccttgttgtttggtccgttgtagtaattgtgattttaggtgtgtttatggctttcttccctagtatgcaaagtagcggtatgcaagatttagtgaatacaaagatgaatgcacttccgcaagatatgatgaaaattttgcatatggattcaatggcggatttaacgaatattgatgcttattttgcgtatgtttttcagtatatttttattgcggcatgcgtatatgcagcattgattggtgcacaggctttaataaaagaagaaacagatggcacaattgaatttttatatgcccagccgattactcgggctagtcttgtgttttggaaaatggttgggaatttattatctttcgtggctttttggttgattacgtttgtagcttctgttgtgctcgttcttgttttaaaaccaagtggggtagatagcgggaatttagtgatggagcttgttcgagtgttttcaagtgagttacttgttgcagctgtatttatgagtgtgggctttatggtgtcagcagtgttacgttccgctaaacaagcttctcccgtcgctcttgctcttgttttcttaacttatattttaggtataatggccgggttaaatgataatgttgactttttcaaatacttttcgccaatcaattatgcgattccatcagaaattatggataaagggattactggaacgaatgcactaatttcctgcgcggtgattattgtagcggtagcagctacttttgttctttataagaaaaaggatttgaaagtataatggatgaaaaacgactaaaaattttagaagcggcgatggaagaatttacagaaaaaggctatcaggcagctagtactaataaaatttgtgcaaaagcgggcgtttccaaagggcttatttttcattattttggctctaaagaaaaactttatattgcagcagtgtcttacgcggttgattttgcgacgaatgaggttagtttggaagagaaacgatggagtgattttgtcgagatggcgatttggtcgacgaaaatgaaactggattttaatcgtaaatatcctgcgatttttggtttgattatgcaagcttacggaaatccaccgccagaattgaaaggtaaattagatggctttttcgataaggcaattgagcggtctgaagcgcaaatgaatcaagttttaaacgaaatgcagttaaaaaaagatgtgaacatggatgcggcgcgaaaagtgatggaagcactttttcagcatattacagagaaaagtacggtgtttttgcaaagacatccgaatgcgacgatggaagattttattccacttgccaatgattttacggaaatgatgcgaattgtcgaatttggtatatgtgaagaaaaaaaggattcgggcgagtgagcccgaatccttttttaaccaataaagctttcgtgatgggtactaatcattgcttcgtctcttgcggtaggttctaaatattttttggcgctattaatcgcaataggaccttcatgtaatccagctgcgataatgcggatttttcgtgaataggtcgcgctatctccacaagcaaaaatacctggtacagtcgttttcatttcgtcatcaacaacaataccgaaatctgctagttcaaagccccattcagccatcgttccaaggtcaactttgacaccgtgattaataaaaagtgcttctgtttcaatcgttttagtaacttgtgtctggttacagcaaatttttatacttgctagttgattatttgctccgattaattccttgatttcatgatggatatgaatttcaacgcgggaatttttaagttcacgaacactttcttcatgcgctttaaaatcttcgccacgatatattagatgcactttttttgcaattggttcaagtgtttgcgcccagtcaatagcggaatttccgccaccagaaaccgtaacgattttgtcacgaaattgctcaaggtttttaacgtcataattgatggctagcgggaaatcgtccacatgcatcgcttctaatttattgacttcaaaagtgccgcttcctgttgcgataacaaccgttttagaaaaatgaatactgccattatgtgaagttagttgaaacacgccatcagttagtttagttacatcaactactcgttcattacatacaatagtagggtgaaaggtttctgcttgctcttttaaattggcaacgagattagctccagtaatagctggaattccgccaatatctcgaatgattttttccgggaaaaagtagcggactttgccaccaacatctggttcagcatcaataatttttgttttcatggaacgtaaaccactataaaatgcggaaaatagcccaattggaccgccgccaataatcgttacatcatacacttcatttggcaatggaatcaagctcctttacaatttcgcacccgttgcaagtttcgtatgggagacaaagagggacaccgctgcgtgggtcaattaaaatatcggctttaatattaaatacgtcttctaacgtttcttcagtcattacgttaactggcgaaccttctgcaactacttttccttctttaatagcaatcatatgatgagcgtaacgagatgcgtgatttaaatcatgaacaaccatcacgattgtacggttttctgattgatttaattgtttgagtaggttaaggacgtctagttggtgagtcatgtctaaaaaggttgtcggttcatcgaggaatagtacgtctgtttcttgcgcgagcgacattgctatccaagcacgttggcgttgtccgcctgataaactgtcaatcggtcggtccgcaaattcagttaaattcgttacacgcaatgaccagaaaataatttcccgatcttttgcggtaattgatttaaaactgctttgatgcggagagcggccataagaaattaattcaaacaccgtcaaaccatcaggtgctgaaggattttgtggcaaaatagctaattgtttggcaatttctcgtgtcggttcattatgaattttcttgccgtctaaataaacagcgcctttgctaggtttcatcaagcgggacatcgtctttaaaatagttgatttcccggaaccatttgccccaactaaggcagttattttattagcaggaatggctatatctaaaccatcaacaatgattcgtttgtcgtatgaaatttgtaagttatctgtatgaaggtctttcattttcatcgctccaatttaaagttaaggtgataatcattctcaatggttaagtatagagtttttacgttaaagatgcaagtgatactttgtcagagaggatttgcactttaagaacaaagttgctatactaactgagaattgttatcagttacaggaggggttcatttgaaaaaaggtttaagtttactcgtattaatgcttttaactacagtagttttagctgcttgtggagatgataaaacggcaggaaatgacaaggttgaaatgcgtacatatacaatggcaaatgggaagaaagtagaaattccggcacatccgaaacgcattgtggcatcggaatatctaggaaatattgttttgcttgggataaagccggttggggctagagcgaaacaaatcgaaaatccgtttttgaaaggaaaagtggaaggaattacagatattggtgatccagtttcagcagaaaaagtggcagaattaaaaccagatttaattgttgtttccaaagaagatgaatatgaaaaaatgtccaaaattgcgccaactgtgttaatcccgtacgcgacttctaaaaatgtggaagaagatgtgcgccaaattgcagatttagttggtgaaaagaaagctggagaagcttggctagataaatttcatcaaaaagcgaaggaaagcagagaaaaattagcaggaaaattaaagccgaatgaaacggtgggcatttatgaagttcaagataaagatttttatgtaatggggcaaaatatggggcgcggaggtcaagcgatttataatgccttacaactgaaagcaccagctaaaattcaaacggatgtattggacggacaagactggcaaaaaatttcattagaagtattacctgagtttgcagcggatagaatgtttgtgacaaatacttcttctggaagtgctaaagacggagagaaaactttaaaagatttaaccaactcaccaatttggaaaaatttaccgacatttaaagcgggaaatgtctatcaaatggattttgacacgatgttttattatgatcctttagcagtagaagggcagttggatattgttgtcgagaagttacttgaatccaactaaagattgcgcttagtgaatgatattgatataattttctttgcgattgataattattatcactaaaaatgagcggataatttagatggaaggaacatgtacagatggataagtcaaaacagataaaaatgaatacaagaccgactgttgctatattcatactttcgggtgggattttgttgcttcttattctagcgttattcgggattgcagtaggggcggctaatattaatttgagtacggtttgggacgcgctttttcattataatagttcggacacacagcaccagattattcggagtttgcgggttcctcgtgtgatagctgatatggcgattggagcagcttttgcggtggcaggagcaattatgcaagggattacgcgcaatccactggctgattctggtttgcttggactgaatgctggatcgacgtttatggtagctgtgtgttttgcttttatgccatggcttagttataactcgctaattatattttcttttgttggtgcagcgattggagcgttcttggtttttggagtaagttccattgctggaagtgcgatgtctcctacacgattagtacttgcgggggcagcggtgagttcgcttcttacggcgcttagtgaagggcttgcgatctattttcagctgagtcaagatttggcgttttggtatgcgggaggcgtcgctggtgtgaaatggagtcagcttgcggcaatttggccgtggttactcggtgcgcttattgcggcaattttattaagcaaatcaattacgattttaagtttaggtgatgatattgcagttggccttggtgaaaaaacgacttttgttaaaatagcttcgatggtagttgttttaattttagcaggacttgcagtttcagttgttggtccggttggctttatcggattgattgtgccacatttggtacgttttttagtcggggtggattatcgctttattattccttgttcggctgtagttggggcgtttttgactttagcagcagatattgttgcccgaacaattaatcctccatatgaaacgccaattagtgttatttttgcattaattggggttcctttcttcctatatgtagctcgtaaagaaaggaggaacttataatgtatatgactgttgctgaaaaacgaaagaaatcacggcgtatttggactttaattattttaagtgtgcttatattttgtacgtttacatatagtgtcaatgctgggtattcgaaattaccttttatagaagtgattaagtctttctttggaatggcggatgccggaacgcaactgattgtgtcagaatttcggttgccacgtattgttattgcgcttttagttggtgcgggacttgcggtttcgggaacgattttacaaggtatttctggaaatggactggctgatccggggattcttgggattaacaacggcgcaggtttggcagttatgctttatatttccttctttccctcaacgatggatgtaccggttttatttatgccatttattggatttgtcggagctattttaacggcatttgttgtatatgggctttcttatagtaggagcgaggggttacttcctaatcgcttgttacttacagggattgctgttgcagctgcgattgctgctttgattacgctcttgactgttcgacttgatccgcaaaattaccagcgttatgctgaatggatggctggaaatatctgggcttcgagttggcaatatgtttatgcgcttttgccgtggttgattgtgctcggagcgattgcttttatgaaagtaaaaacgctcgatgtgctgtcatttggcaatccagtggccanttgggttaggtgtccgagtggaacgcgaaaaatttgttctattaatagtagcggttggtttagcagcggcttgtgtctctgttagcggcgggattgcatttattggtttaataggccctcacattgctagaaaacttgttggctcagcgcatcgttgggtaatggttacggcggctttatcaggggggctattgttactactcgctgatacgattggccgcttgattattcaaccttccgaaatctttgcgggaattgttgtcgcgatcattggagccccgtacttcttgtttcttcttgctaaagctaaataataattattattaataacgagaaattaactagtaattgataatcattgtagacagcctattgcttttgtgctatcttagtaaacataaggaataggaattgtctaggtgccatttttaaagtgataagtggattttgaacttgcattttaattataattattataaactgtatttattgttaaatgataatgatgataatttagaacgacaacttgttatcgcaactaagggaggaaccataatggaaggtcgtattggacgcattaaagcacaacttcatgatgctagttataaattaaccccacagcgagaagctactgttcgcgttttactggaaaatgaaaaagatcatttaagtgctgaggaagttttcttgcgtgtgaaagatattgcgcctgacactggcctagcaacagtttacagaacgttagagcttttaaccgaactacgcgtggtagataaaattaattttggtgacggtgtatctcgttatgacttgagacaagaaggcgccaaacatttccatcatcatcttgtttgcttggaatgtggatctgtggaagaaattcaagaagatttactagaagatgtagaaaaaatcgtggaatcaaaatggaatttccttgtaaaagatcatcgtttaactttccaaggaatttgcgcagattgcagacaaaaatctaaaaaaaataatagttgagtttgggattatatatctcaaactttttttattggcaaaaaagatggactgaattgtgcgaaaagtattataagtttttttcatcgcttaaacgttttcactgaggaaggaacatggtagaataggatttgtggaggaaatgcttatgaatgatttgattgatgattttttacactttttaattgtagagaaaggcttatccgcgaatacaataaaagcttacgaacgagatttacactattttgtttcatacatggatacctctagaactttaacggacccggatacactcgaacgaaacgatatagttggattcatggcatttgctagaaaagaaggaaaatcaccaagaagcgtagcacgatatattgcttcattgcgatctttttttcattatttaatgcatgatggaaaaatgtcgcacgatccaatgattcaaattgaaacgccaaaacaagcgcaaagcctaccaaaagttttaaacttagatgatgtagaaaaattacttagttcatcagatactagcactccgctcggactcagagaccaagcgatgctagaaattttatacgcgacggggcttcgtgtaaccgaacttgtaaagcttaaaatggatgatttacatcttcaaatgggctttattcaaacgattggtaaaggtgataaagaacgaattatcccgcttggaaaaacagcaaccactgtggtgggaacaatatttagaagaagcaagacctaaacttagaagaccgaaataccggaatgattttgtgttcttaaatcaccacgggcaaggactgacaagacaaggattctggaaaattttaaaaggaatcgcgaaggagtcgggcatcgaaaagccgattacaccgcatacattgcgtcattcatttgctactcatttacttgaaaacggggctgatttaaggtcggtgcaagagcttcttggccacgccgacatctccaccacacaaatttatacccatgtaacaaaactgcggcttaaagatgtttacaaacaatttcacccgcgcgcttaaaaaataaagttgaaaaggatgagtaaatatgccagataaatttaaacgagtacatgttattgtaatggattcagttggtattggggaagcaccagatgctgctaaatttggtgacttcgatgtggatacatttggtcatattgcaaaacacgttggcggcttaaaaatgcctgaaatgggcaaattaggattatccaatatccgtgaaatcgaaggaattgaaaaagctgaaaaaccacttgcttattatacaaaaatgcaagaggcttctaacggaaaagatacaatgacaggtcactgggaaattatgggactttatattgatactcctttccgtgtgtttcctgatggatttccagacgatttaatcaaccaaattgaagcaaaaacaggtcgtaaagtaatcggcaacaagcctgctagtggtacagaaattatggcggaacttggggaagaacatgtgaaaacaggtgcgctaattgtgtacacttctgctgactctgtattacaaatcgctgcgcatgaagatgttgttcctttagaagagctatatgaaatctgtgaattctgtcgtgaaattacattagacgatccgtatatgcttggtcgcattattgctcgtccatttgttggtgaacctggcgcgtttgtcagaactccaaaccgtcacgattatgccctaaaaccttttaaaccaacagtaatggatgctttaaaagatggtgggaaagatgtcattgcgattggtaaaatttcggacatttttgacggagaaggtgtaactgaatctatccgtacaaaatcaaacatggatggaatggaccaatttatcgatgtgttagataaagattttaatggtatgagtttccttaatttagttgactttgatgcactatttggtcaccgtcgcgatcctcaaggttatgcggacgcacttgttgattttgatggtcgcttagtagaagtgatggagaaattaaccgatgacgatcttttgattattacagccgatcacggaaatgacccaacatacactggaacagaccacactcgtgaatttgtacctttacttgtatactctccgcgctttaaaaacggcggttctgaattagaattacgccaaacttttgctgatcttggtgcaacagtagcggacaattttgatgtaaaaatgcctgaatacggaaaaagcttcttaaaagatttgaaataggaaagaggaggaacaacaatgagtttagaaaaagtaaatgaagctgttgcgaaaattagagaaaattaccctggggcgccaacggttggtttaattcttggatcgggtctaggtgtattagcagatgaagtaaacaacccaacaaaactatcatacagcgagattccacattttcctgtttctacagttgaaggtcatgcagggcaattcgtttttggtgaattagaaggaaaagaagtagtagcaatgcaaggtcgtttccatttttatgaaggatattccatgcaagatgttactttcccggttcgtgtaatgaaagaattaggtgttgaattacttatcgttactaatgctgctggtggcgtgaatgaactgtattctgctggagacttgatgttaatttctgaccatattaactttactggtactaatccacttattggaccaaatgacgaacattttggtcctcgtttcccagatatgtctgaagcttataacttggcgttacgtgtcgatgctagattaattgcacaagaacttaatttaacgattcgtgaaggtgtatatgctggatttagcggtccaacatacgaaacacctgctgaaattcaaatgatgagaacacttggagcagatgctgttggaatgtcgacagtgccagaagtaatcgttgctaaccacgctggattacgagtgcttggtatttcttgtattacgaatatggcggcggggattctcgaccaaccactttctcatacagaagtaattgaaacaactgaccaagttcgtagcacgtttttacaatatgtaaaagcgattgttgctaaaatttcttaaaataattggtagctaatctcagtccaaattcgttattttctgaagcgagaaataatgaatatgggctgagttttttatgtatttgataatattttcagatagttattgtcgctcggcttcttagtatgctactatataaaagaacttttaaaaatctataatgtaaaggtgggattggcgtgacgtttgaacggcttggaacaatgaatgtaaatgcagaaggacatctcgaaattggaggggtggacactttaaagcttactgaaaaatatggtacgccgctgtacgtttatgatgtagcgctaatccgtgaccgagcaagaggatttaagaaaacctttgaagagttgggtgtaaaagcccaagtagcttatgcgagtaaagcgttttctgctgtagcaatttaccaattaatggcggaagaaggcttgtctcttgatgttgtatcgggcggcgaactctatacagccattaaagcgaatttccctcctgaaagaattcactttcacggaaataacaaaagtgcagaagaaatacatatggcgcttgattatgggattggttgctttgttattgataattattatgaaattagtttattagaagatatattaatagaacgaaatgaaaaagccgctgttttaattcgcgtgactccaggtattgaagctcatacacatgattatattttaactggacaagatgattcgaaatttggatttggtcttacaaacgggcaggctgaaaaagcaattaagcaagtgcttcatgcaagtgcttcatttgacttaattgggcttcattgtcatattgggtcgcaaatttttgaaacaactggttttaaactcgcagctcgtcgaattatggataaattagtagaatggcacggaacactcggttttgattccaaagttcttaatcttggcggtggttttggtgtgcgttatactgctgaagatgagccactcgaaccaagtgaatatgtgcgtcaaatcatggatgaagtgcgtgatgttgctaatagtaatgatattgctattcctgaaatttggattgaaccgggtcgttcgctcgttggtgaagctggaacaaccctttataaagttggctctcgtaaagaagttccgggtattcggaattatattgcagtagacggcggaatgtcggataatattcgcccagctctatatgatgcccattacgatgctgttcttgcagccaatcctgaaaaagttgctgaagaaacggtagctattgcaggaaaatgttgtgagtctggtgatatgttaatttgggatttaccgttaccaaaatcagatgctggcgaaattttagcagtattttgtaccggtgcttacggttatgcgatggcaagtaattataaccggattccacgaccaccagtagtttttgtggaaaacggaatggataaattaatcgttgcccgcgaaacttatgaaaatttagtacaaaatgatctttcattatagtagggcgggacaaacatggtagaaatgaattttaaagtagaggcttttgaaggtccgcttgacttattacttcatttaattggtcaactagaggtcgatatttatgatattccaatggctgaaatcacggatcaatatatggaatttgttcatacaatgcaagaaatggaattagatgttgcaagcgaatatttagtgatggccgctactttactagcaattaaaagtaaaatgcttcttccaaaacaagaactagaaatcgattatgatacactagaagaggaagaagatccacgtgatgctttagttgaaaaactaatggaatacaaacgatttaaagaagctgcaaaagaactgaaagaaaaagaagccgaacgtagcttttattttagtaaaccaccaatggatttggccgagtatgacgaaggaaccaaagtggcggaactcgatgtatcgttaaatgatatgttaagtgcttttaacaagatgctacgacgcaagaaattaaataaaccactgcatacaagaattacaactcaagaaatttcgattgatgatagaatgaattccgtactcggaaaactacatcaacaaacaaatcaccgtttacgtttcgatgaactatttgaagaacagacaaaagaacaacttgtcgtgacttttttagctctactggagttaatgaaacgaaaattagtcgaagtagagcaatcagcaagttttgcagatttatatgtgcaaggtaaaggggaagaactatcgtgaacagagaagaacaattaggcgtattagagagcttgctttttgcagcgggggatgcaggtctttcaacagaacaattaacggaagtcatggaaatcacgcatattgaagcactcaatttattagagcttttaagtgaacgatataatggaaatgaggacagagggctgattttactagagcttgctggaactttccaattagctacgaaaaaagcacatgcggaatttttacggaaattagtggaagttccgagcaatacagttttatcacaagcatccttagaaacgttggcaatcattgcgtatcgccagcctgtgacccgaatggaagtagatgaagttcgcggtgtgcaaacagatggaccgattagaacgcttgttgcaaaaggattagttactgataaaggtcgcgtggacggggcaggacgtgcaaaactatacgtgactacaagtgagtttttggatgcattcgggctgaattctttagacgatttaccaaagcttgctgacccagaagcagaagacccagatcaaagcgaaatggacctgttttttgaccggtttaaccaaagtaaagaacaggaggaggaataagaatggaacgtttacaaaaagtgattgcgaatgcgggagtaacttctagaagaaaagcagagaaacttattcaagaaggtaaagtaacagtaaatggaaaagtagttacagaacttggtgtcaaggtttcaggaaccgaacgaattgaagtcgagggaatccaacttacaaaagaagaacaccgctatttccttttttataaaccaagaggaacggtgtcagctgtaacagatgacaagggacgcacgacggtagcggattattttacagatattccagaacgactttatccagttggaagacttgattatgatacatcgggcttattattaatgacaaatgacggtgactttgcgaacttgctaatgcatcctaaaaatgaagtgtccaaaacttatattgctcggattaaaggaattccagaacgagaagttattcgtgagttagagcgcggagttgttatcgatggtcgtaaaaccgctccagcaaaagtaaaagtacgttcttctgataaagcaaaagacaaagcgatagttgaaatcactatccatgaaggacgaaaccgccaagttcgtaaaatgttcgaagcagtcggttttgaagtacaaaaactagctcgagaagaatattctttcttgaatttacgtggtttaaatgcgggtgaaagaagagaattatcacatcatgaagtaaaacaattaaaaacagaagcgagatttggcaagaataaaaagtgacatttcgacataaaatatactttctgatagcgtgttttgtgaaaaacatgtataatttaaatcgtagtaaatttggtataggcaattgtatggttttccgtatgtgggtacgagaaattccatttaattatttgaatttaaatgatgcgtttttatgtaaatgagagttaggggatgagtacttatgagtgaacaagttagagtgcttgttgtggatgatgaggaccggatacgccgccttcttaagatgtatcttgaaagagaaaactatcgtattgaagaagctagtgatggtgatcaagcattaaacatggcactgaacaacaattatgaagtgatcctgcttgatttaatgatgccaggtaaagatggtatcgaagtttgtcgtgaattaagggaatataaatctacaccagttgttatgttgactgcaaaaggagaagaagctaaccgtgtgcaaggctttgaagtgggagcagatgattacatcgttaaaccattcagccctcgggaagtagtgctacgcgttaaagctgttctttcgtcgtgccaaaacaatcatctgaagaagctgctggaggtcccccagaaaacttttttactttcccacatttgaaaatggatattgaagctcatcgggtttttgtagatggaaaagaaattggcctaacaccgaaagaatatgatttactttattatttagctaaatctccagataaagttttcgaccgtgaatcacttttaaaagaagtgtggcgttatgaattctttggtgatttacgtacaattgatacgcacgtaaaacgccttcgtgaaaaactacatgatgtatctgaagacgctgctagaatgattgttacagtatggggccttggctataaattcgaagttccagaagattaatgacgagtattaagatagcgggcaaagacgtttaatcggcaagtgttatgccgcacgtgctttgttcgttatttttttgtgaagtgaggtgagatagatgaagatttggaatagtatcgttggcaaaatatggagtacaatcattttattattgattgggattttagttatatcgggattcttagtggcgatgatttatgaaaaaaataatatggctcatattacaaaagagttagaagagacgacatcaagtattatcaccattatgaaagaaaacgatgaagttatctccaacgaaaatgataatgattccgcactgacgttacttgataatacaatgggcgtcattattgaagaaaacggaaagaatatttatcaatctcaatctcctgacacggtttctagcgcatctgccaacaaactcattcatgataaaacgttaaataaagctttagaaaaagataacagcattacaatgaagtataatttcaaaacagaagatagctccttacctgtcgaaatttctgcacagaagtttgttttaagtaacggagaatccggtgttgtttatgtttaccaatcgtatcatgatattttaaaagtgaatcaaaaaacgatgagaacacttattgtttcaggtatcatagctattgttattacttcgattttatcttttgtcttctcatctagaatggcttttcctcttcgtgaaatgaaaaagattgccatagctgtttcaaaagggaattttgataatcgtgttccgacttacacgcatgatgaaatcggtgaactcggggtcgcttttaatgatatggctaaacaattaaaatataatattagtgcccttcgccaagaaaaagagcaattatctaatattttagtaggaatggcagatggggtaattaaattcagtgtagataaaacgattattttaagtaatccacctgcagaagaatttttacataattggtttttctcacctgagaatacggaaaaagtactgataccaacagctttaaatgatttattgaatgatactttagacaagaaagaatcgcaagtgggcgaaataactttttctgaccggacgtatgtagcaattttgacattattatatacaggtgagcatgttcgaagtattgttgcagttattcgtgatatgacagaagagaaacagcttgagaaaatgaagagcgattttgttaacaatgtgtcgcatgagcttagaacgcctatttctatgcttcaaggttacagtgaagcgattattgatggagttgctcagtcggatgaagaagtgcgggaatttgcacaaattatttatgacgaatcccttcgcattggtcgattagttaatgatatgctcgaccttgcaagaatggaagccggctttaatcaaatggacaatcaaaaattacctctagctccattactacgaaaagtaatcgctaattttgatgttcttgcgaaagaaaactttgtagaacttggcttagaacttgaaacaccagatttagagtattcctatgaccccgaccggatggagcaagtgttaattaatttaatcatgaatgctatccgccacaccgggaaagagggctacgctggaaaagttattttaaaacaaacaattgatgaaacaagaaataatctcgtaattacagtatccgataatggtagtggtattgctgaagaagacattccatacctattcgagcgtttttataaagtagataaggctagaaaacgcggaaaagctgtggggacagggattggccttgcaattgtaaaaaacatcgtagaagctcataacggaaaaatttcagtagaaagtgtgctaggtaaaggatcagactttatcattaccttgcctttgtataaatagattggagcgaaaatcatggaaaatagacaaacgaaattttgtaaagaatctttagtaattaaaactagtcgggtgtttccatccgatacaaataatcataatacactctttggtggaagattaatgacgtatattgacgatactgcttctatcagtgcatctcgtcattgtcgcacagaaatcgtaacagcttcgactgactcggtggactttttaaagccaattaaaaacgaccattctgtttgcctagagtcctatgttgcctcaacaggtagaagctccatggaaatttttgttaaaatcattgcggaaaacttaaaaacaggggaacgctatttagcagccacttcttttctcacttttgttgcgctagataatgatggcaaaacagtggaagtacctcttgttaaaccagaaacagaagaacaaaaaagaatccacgctggagcagaagcgagaagcattgcgcgtaaaattcgtttaaaagaaaatcaatcattagcggaatcattgtctacgaatattccatggtaaatagataaaaaccagataatcatctggtttttatttttgtaaccaagaaagcgcttacgtgaaaaaatatacaaaaggacttgcgaaaaaatattttcatggtaaaatgaaaattgtaataaaatattcgttcatcttcggggcagggtgcaattcccgaccggtggttaaagtccacgatctgctttcttagcagttgactctggtgtaattccaggaccgacagtatagtctggatgggagaagatgttggcagaccttttcgtttgtcttcacgagcatgtgttagcaagctgtgatgcttatttgagtattcagtgcttgtttaattaatcacaaactctccctcgactttttttagttgaggttttttatttgcttgggttgcattcgtttagtgatgtcactcgcttcttggtgaacatcaagggagaaatgacaatgaagaattattcaatgaaggtttttgtaagtgtggcggttcttggtactttagcatttattttaatgatgctacaatttccgctgctaccgagtgcaccatttttaaagcttgattttagtgatattccagctttgattggtggcttattattcggaccactcgcagtgattttagtagaactaatcaaaaatgtcctgctttacattgtgtcaggtagtccagtcggagttccggttggagaattagccaattttattaatggtattttttatgtattaccgatttattatttatttcactggttccgctcaacaaaaggaatggtgctttcaacagcagttggaactttagtaatgacaggcgcaatggtgatatttaattattttgtattattaccattttacattaaacttggtggacttccggcggatacagatgttgcttggttagtcacatatacgattataccctttagcttattaaaaggagtcatcgttagtgctgtattcttgatactgtactctagacttaaaaaatggattgctaaaaaccaaactgtaaaagaacgtcgtaaatttgaaaaaagacagcaggaaacaagtcattaacataaataaaatccgtgagtccactgcgactcacggattttttaatggaacggagaatcagaaaccttaatcgaaagggaaggacaagcaaattcagcgtcaatgaccatttcctctaagtcttctgggatttcttttgttccagtattattatctaataaattataggcaagaccttctgtatcataatcaaaaacatctggagcgtgaatagaacaagcaccacaagcaatacaagtgtctttttcaacgagacaatacttcaattttctacgcttcctttctaaaataacagtttgaagcaagattttttctttttctattgtaccatattttgataaagtttttttcgggaaaagtaatgtagaacaagtgtttctgtggtatgattgatgttagaaaaaaaggtggtgagaacgtcttggataagctagataattatattgtaacaattttagaaaagagtattactcctagaaaatcgccatttttacatactattttggccggtagaagaactggtcaagctgttcaggatgctcatctttttcaaatgcagcatttatttggactagtaccaaatttgaaattaaattatttagaaacaagacttaaagaattaatgcgacaaggtataattaccgttactgaaaatggctatacagtgaaacagaagccgaatttttcgtttgaaatgagttttccttcttttcatggatttgcttttcaacaacaagtttttgcctttttcgcccatttacgccttgcagttcaagttgttagtaataaacaccatgctgagaaatattatttaccagttatccgcgataagaaagtacagcaatttatcaaaatttggctacaaaaccagcaacaagaggaccttgctgacagattatatattgaactcatcaagtggtttaatagtttagcggtaagtagaccagaatttttagtggaacgattttctggcgggaaactaatgggctatacaacagaacaaattgctactaaatatcaagtagagaagtgggatgtttattttgaagtgttacatgaacttcatcgcttgattgctgccataaaagaaagcgaagaggagtggccacttttagctagtttaataccgaatgagctgatgagcctgacttcttctgctataaaaacttatacactatgggcaaaaggaatggatttggagatgattgaacgaatccgaaatttaaaaacaagtacgatacaagaccattttgtggaaattagagctactttgaaagaagcacaagttccttatttacctgaggaagaattaatccaatcaattaattcgagaaactggcatttacttcgcgacataaaagctgcatttccagatttagattattatcaaattcgcttagctgtcgttagtaaggaggacgaacaatgaatttagaacaagaattaaaggcctatcttggttttgatgaatttcgtcctggacaaaaagaagtaattgaaaaagcattagctaagaaaaactgttttgcaatgctaccaaccggcaccgggaaaaccgtttgttatcagttagcgggccatctaatggacggattagtgttaatcgtgtctccgttactctcactaatgcaagatcagatggagagaatgcgagctcacggtgaaaaacgtgttgcggcgcttaatagttttttaaagaaagaagaaaaacaacaaatccttgcaaatattcatttttataaatttatctttttatctccagagatgttaaacaatgaattcgtcaaaaatacgcttctacaacaaaagattagcttatttgttatagatgaagcacattgtatctctcagtgggggcatgactttcgacctgattatttgatgttgggacagtttattgaagatgctaaatttccagtgtcaatggtacttacagccaccgcaactaaaaaagtccgagccgatatattaaaacaattgcgtctaaacgactgtgaacaggtgatttattccgttaaccgtcctaatatttatttgcaagtggaaaaatttacaaatcaactttctaaaaaagaacgtctatatgaactagtttccaaactaaaaacgccaggaatcatttatttttctagtaagaaactagcggaaagtactgcgcaagagttgaatgaagtattaggattaaatgctgcctactatcatggtgatatggaaacggaagatagaattgtgattcagcaacaatttgtttatggtcagttagatattatttgtgcaacaagcgcttttggcatgggaatagacaagtcagatattcgttttgttattcattatcacatgccagcagacttagaagcttatttgcaggaaattggcagggctggtcgtgacggaaaagaaagtgttgcgattttactgtatgcaagtggagatgaatttatccaaatgcagttagcagatcaagacataccagatgttaatcttatgcatctatcgaaagaacaacttaaaactcttccagaagcagaacaacgctttattgattattaccaaaaaagtggtttaactacagccgaattaacaaccaaaatggaatatcgaaaaagctggaaaagagctaatttacaacaatttatcggatacttacatgaagaagagtgtcgtagaaacaatattatgcgttattttgaagaaagtccgctagaagtaacaccagaaaattgctgcgatttagatagtacctttacaataagttttgaaaaagaagaaaaaacaagcgccaaagaaattttgacttgggaaaattacttatcttatctacttcaataaatattaagttacgaattttgacaaaaagtagcttatttcacattttttgtaaaaaaaagacttgtttattggcgaaaaaattgttattattttgttcagtaatctgtatgaaataaaaaaagcttatatgccagaagtactaaattataatgattattgcttttttcttctaaaaaagcggtttaagtgttgttgtatattgcttttatggttataattatttcaaaggtatttcatttatttacatcttatgtaacacttctctgtgccaataatagtgcataggataatattagaaagcactaaaggaggaactttgagtggcaaaaacaagaaaaagtaaacgggaatatgaagaaccggctgattttgatatgaattctgaaggacaagacgaatttaataatgaaccgccgatgctatcccgttctgatagcagaaaaggaaaaaagaaaactatttttagatacccattgcttaatttattgattgtgtttttcttattaatcccaatcgttatagtaattgtatttgtaacagtacaaaatatgggatcaactaatgaagtgaaaacagagactgaatcgacagttaatgtttctgacaacacacaaaccaaagcagaaaaagaaaaagctaaaaaagcagcagaagaaaaagccgcggctgaaaaagctgcagaagaaaagaaagcagcagaagagaaagccgctgcagataaaaaatcccaagaagatgaagctgctaaagccgcagccgctaagaaagaacaagaagcagcagaagaaaaagctgccgcagagaaggccgctgcagacaaagctgctaaagaaaaagccgcagcagaagccgctcagaaaaaagcaaatgaatcaacacaaaagaaagctggaggttctcatacagttcaagcaggagatactctatacagcatagcgcgttctagctatggacaagctggggctgctgctggtgttgagaaaatcaaacaagcaaatggacttggtagtaacaatgttccagttggtacagttttaacaattccacagtaataacaacactgaatgggtctgggaaacgcttccgagactcatttgtttgtttaaatggaaaaatgtagggggatatgattatggcaaaagtagcactaattacaacaggcggtacgattgcaagtaaaaaaacagcatcaggaaaacttgcatcaggagaattatctggagaagaattagctgcattatgccaattaccaacagaaatccaaattgatatttattcaacttttcaacttccttctatgcacattgcactcccagatcttattagtttaaaacaattaatagaatctatttttatggatgaaacatatgatggtatagttgtaacgcatggtactgattcactggaagaaacagcttatttccttgaccttgctgtaactgatgcaagaccaattgttgttaccggttcgcaacgagcgccagaagaaccagggacagatgcttacgtgaacattcgccatgctatttatactgcatgcgaagtgaatttacgacaagctggtacagtagtagtttttaatgaacggatttttgccgctcgctatgtcaaaaaagtgcatgcatcgaatattcaaggttttagtgcatttggatttggttatcttggaattattgataacgatcaagtttttctttatcaaaagccacttgaacacgagtgttttgatattcgccttgatttaccggaagtagtagttattaaatgctaccttggtgcagatggtctattcattgatgcagcaattgatagtggcgtttcaggaatcgtacttgaaggtgtagggcgaggacaagttgctccgaaaatgatgccagcaattattcgtgctttagatgcgaacattcctgttgttattacgacgagcgcggaagaaggaaatgtctatactacatatgactacgaaggtagcacgtttgatttatacaatcgaggtgttattttaggaaaagattatgatagcaaaaaagcgcggatgaaattaatggtgcttttagcgtcccaagaagagatcaatcaaaccaatttcagataaaaggagttttattctatgacgaagaaaatatgtatcgcaattgatgggccagctgcagcgggtaaaagtacagtagcaaaaattgttgcgaaaaaattgcgttttgtttatattgatacgggagctatgtatcgagcggttacatatattgcgctaaaaaataatgtggcgtacgaagacgaaatggcaattgatgctttacttaaaaaaacggtgattcgtttcgaacctggtgaggtacaacaagtatttgtaaatgaagagaatgtaacagatgtaattcgttcactagaagtaactaatcatgtttctatcgttgccgcacatccagctattcgagaagcacttcaagaacgtcagcaagtttttgcaacagagggcgggattgtcatggacggtcgtgatattggaactgctgtacttccaaacgcagaacttaaaattttcttgttagccagtgtagaagaacgagcagaacgacgctataaagaaaatatggcaaaaggttttgctggcgatttaaatcaattaaagaaagaaattgaagaacgagatcacttagattatactcgtgagcattctcctttaaaaaaagcaaacgatgctattgaagtagatacaacatcgatgtcaattgatgaagtcgcaaataaaattctttcacttgctgaacaaaaaatccaaaattaatgaaaaagtgctacattttcagaactaaatggaaatgtagcactattttaatttaaccgtgaaagtctaaacaaggtgagcgatttcacggtctataggcaatttaacccccttaaaagagcttgacaaatgtttggatttgtaggatgttataagagagattttttactttgtgaaaagtatcttgaaaggattttctagctggaagataagttttactgagggtgtatttgttatttttctttatgtaattagaaattgcctattgaggaaaactagtcaagcggatgaggcaaacgtgaaaagttgcttctgaattagaaattcctaaaattcgactaacgaatggagggctacacatgtctgaagatttatttgatgtggaagttagaaattttgaagaaggagacaaagtcactggcacagttacaagcgtggaagataaacaagtttatgttggtattcccgatagcaaacttgatggtgtcgttccaataagtgaactttccaatatacatgtggagacagcttctgacgttgtaagcgtaggcgacacacttgatttgattgtcactaaagtagaagacgatgtacttgttttatctaaaagaaaagtggatgcagaaaaagcgtctgatgatattaaagctaaatttgagtctggtgaagtgttcgaagcagttgtcagtgatgttgttaaaggcggattagtagttgacctaggagtacgtgcttttgttcccgcttctttagtagaagatcattttgttgaagattttgcagattataaaggtacaacccttactttcaaagtagtagaatttgaaccagaaaacaaccgagtaattttaagtcaccgtgcagttgtggaaaatgaaaaagctaaccaaaaacaagcactattaaatgaaatcaaagaaggcgacgtgattgaaggtactgttcaacgtttagctaactttggcgcatttgttgatattggtggggtagacggacttgttcatatttcacaaatttcttataaacatatagctacgccgcaagaagcgttagaagaaggtcaaaaagttaaggtaaaagttatcgggattgatcctgaaaatgaacgcatttctctttctattaaagcaactttaccaggaccttgggatggtatttctgaaaaagcaccagttggttctgttttagaaggaaaagtagttcgtttagtaacttttggagcttttgtggaaattttccctggcgtagaaggtttggttcatatttctcaaatctcccacgaacatattggaacaccacaagaagtcctttcagaaggtcaaacagtagaagtaaaagtactagaagttaatgaagatgacaaacgtttatctttaagtattaaagacttgcaagatgctccagttgaagaagctgattatgaacttccagaagaaagtactggattccaaatgagtgatttaattggtgataaattaaaaggacttcaaaacgacgataaataattgttcgtaaaagagcctagggagactgttcccataggctctttttatttttcacatcgaacttttcattgccagtaagctgttttactgataaactaaagaaagtttgataaataggattcgagaaaaaagaaggtgaaataatggcaaaaccagttgtagcgattgtcggacgtccaaacgttggcaaatcgactatttttaacagaatcgttggtgaacgtgtttccatagtggaagatgttcccggtgtgacacgtgaccgcatatataattcagcggaatggcttggaaaagaatttaacattattgatacaggtggtattgatctttccgacgaaccattcttagagcaaattcgcgcacaagcggaaatcgcaattgatgaagcagacgtaattatttttattaccaatggtcgtgaaggggttaccgatgcagacgaacaagtagcaaaaattctttaccggtctaataaaccaattgttttagcgattaataaagtagataacccagaaatgcgtgatcagatttatgacttttattctcttgggtttggtgagccgtatccaatttctggttctcatggactagggcttggtgatatgcttgatgctgttcgtgctcattttccaaaagaagaagaggaagaatacccagatgaaacagtgaaatttagtttgattggtcggccaaatgttggtaaatcatctattctaaacgcacttcttggcgaagaccgcgtcattgtttctgacattgcgggaactactcgtgatgcaattgatacaacttatacgtttgatggtcaggattatgtcatgattgatacagccggaatgagaaaacgtgggaaagtgtatgaaagcacagagaaatatagtgttttacgtgcaatgagagcaattgaacgctccgatgttgttcttgtggttatcaacgcagaagaaggtattcgtgagcaagataagcggattgctggatatgcgcatgatgccggacgcgctatcattattgtagtgaacaaatgggatgcaattaacaaagatgaaaaaacaattaatgtatggacagaagatattcgggagcagttccaattcttaagctatgcaccaattgttttcgtatctgctaaaacaaaacaacgcttaaacaacttattcccgctcattaaccaagtaagcgataatcattcattacgcgtacaatctagtatgctaaatgatgttattagtgatgcggttgcaatgaatccatcaccaatggataaaggtaaacgacttaaaatattctatacaacacaagtggctgttaaaccgccaacatttgttgtatttgttaatgatccagaactaatgcatttctcttatgaacgtttcttagaaaaccggattagagaagcatttccgtttgatggtacgccaattcgagtaattgctcgtaagcgtaagtaaagttttcgggaggaaaaatataatgacacagaaaaaagttgctattcttggcgctggaagttggggaacaggactcgcacttgtcctagctgataataatcataaaccagttatttggggaaacttagataaaattgtgaatgaaattaacgaatcgcacacgaatagtcactatttgccagatattattttaccaactgaggtaaaagcgacattatcacttgatgaagctatagatggtgctgaaattgtcgtgattgctattccaacaaatgcaatgcgtgtggtttgtaagcagctaaatgaagcgctgaaagaaccaactattttagtgcatgttagtaaagggattgaaccagaaacaaatcttagaatgtcagaagtaattgaagaagaagtagatgctacaaaacgtaaagctcttgttgttctttcagggcctagtcacgctgaagaagtagctcttcgtcatccaacaacgctttgtgctagctgtaaagatttgaaagcagcagaaatcgtgcaagatcgttttattaataataatttacgtatttatacgaatgatgatgtcatcggtgctgaaattggtggagcgcttaaaaatattatcgcacttggcgcaggaatctctgatggccttggatacggcgataatgctaaagcggcactaatgacacgcggaatggctgaaattactcgtctcggagttgctgtgggctctaatccacaaaccttttacgggctaactggtattggtgacttaatcgttacttgtacaagtgtgcattcacgtaattggcgtgctggaaacatgctcggtaaaggcgagaatttagatgaagttttagaaaaaatgggtatggtcgttgaaggtgtgcgtacagccaaagcagttcatggttgggcgaaaaaactagatattgatatgccaattaccgaatcgatttacgcgattttattcgagaataaagatgctcgagaagccgttgatttattgatgggtcgtaaaaagaaaatcgaaaaagagtcattttaatagagagagccaagataagttttccgcttatgttggctctttttttatgagttatgctaaaatgaagcagaagagccaaatttgaaaaagtaggtggagaatatggaagttactcgtacagataaagccgtaacattaagatgggaaaatgaagaagtcagcgaaggtacgttggtttttgtaagtagtagtccgtcactagaggcaaatagtgaacctgtctttaaagtatctaatgcagcaaaacattatacttttgaaacaaaggacattccagtttatttctttttacaggcaccgaacggagacaaaagagttgtttctgaacggatattaccgctagaaagtgtttttaacttccgagatatgggtggttacaaaacgaagcatgggcatcacgtaaaatggggtaaattatatcgttcttccaatttagtaaacataaatcaagcagacgccgcattgctccaaaagttacatattaaatggatttgtgatttgcgaagtagttctgaagtacaggcgcaacccactccagaaatccaaggtgttcttaataaacatatcccaatcggtacagcaaaaaatgaaaaaactaccctcccagtatcaaatgacaaagcgatctatgaacctttgatgggggagagttaccgtgtatttgtgcaatcagtagacggatttaaagaaatttttagtgagatattaacggatgctaaagcgggtcttccatttgtttttcattgcaccgctggaaaagaccgtacaggggtcttagcggcacttttattaacattactagatgtaccagaaaaaacgatttttgacgattacgcaatcactaaccgctatcaggacaacattctacaagaaatgggtgggattgtgtcattattttcaaatggaaacgaaaaaatcgacttggaagcttttcgtccgatggcagaagctcgtccagaatatttgaaaatagcctttgatgaaatgaaaaaacaattcggttcagtagatggctatttggaaaaaggaatcggaattactgcggaagaaaaagccatcatccaacaacaattattagaataaaactaggctcagaaacctagagttgtcaggtaatagctctgaatttgcttctatttttatgaaaaaagaactattttagccaattatggtggtatcgcttgctattctaagggttccaagttagtattatggttaacaggttgatactatcacgttttcaagccataagagaaaaacatatgtgattgaaaatgttaagaaacagtgtcagtttggcattattccttgcagttgctgggattatgtgataatcttttatcagaattactgttaaggcttgtagttaagccatttcagtcacaattctccttaaattccaaaattaattttacttttggaaaaaaacgagaaatacaggtgtctcatagtgcctgcttattttgaagtattctgtgaaggaggtgaaaaacacaatggcaaataaaactgatttagtaaatagcgtagctgaattagctgatctttctaaaaaagacgcagcgaaagcagtagaagctgtattcgaaactattcaaacttctttatctaaaggtgaaaaagttcaattaatcggatttggtaactttgaagtacgtgaacgtgctgcccgtaaaggccgtaaccctcgtactaaagaagaaatcgacatccctgcaagtaaagtaccagcgttcaaacctggtaaagcgcttaaagaagctgttaaataagttacatagactttttaagcactaactctagtctggccttaattttataattaagctaggctagtttttttttggtgattatttccagacgaaatagggaataaagagaacaaaatagtaaaacatcattattatctcttatttaagcaaattaaatttaccttgaagttcggctgtgttaagatatacaaggtatataatgctaaaaagataggggaattaaggatggagcaaatagacaaacaaaaaattgctgacgcagtgaaagttattttagaagcagtgggagaaaatccagaacgtgaaggactaattgatacaccaatgcgagtagctcgtatgtatgaagaagtttttgctggactcaagaaagatccttctgttcatttcgatactatttttgaagaacaacatgaagaactagtgcttgtaaaagatattcgtttttcctctatgtgcgaacatcatcttgttcctttttttggcgtagcacatgtggcttatttgcctcaaaatggacgagttgcagggcttagtaaacttgctcgtgtagtggatgatgtgagtcgtcgtccgcaacttcaagagcgtattactacgactgttgcagaaattatgatggataaattaaaaccactgggagtcatggtgataatggaagcagagcatatgtgcatgaccatccgtggtgtcaataaacctggaactaaaacaattacaagcgcagtacgaggcgcttttaaaaatgacgataagcttagaagtgaagttttggctttaattaagcataattaaatatcctttatggtataatttattttacgtaataaggagattcaaaggggattgttaaatgacttatcaggcgagagaggctgggctaaaggaagtggagcagttggtacatgagcaagcagtctatcagtatttacaagagaataatgaaggcgggcaaatggacaaagatcaaatgctgtttcttcatgaagcgatttccggctctgatttggctgatgctgctgcgtatcgtgtagttagtgcaacgctttacatgatattagctcatgacacgcatgaaaaaattgatgaaccaggtgatgttgtacagctaactcggaaagaacaagagttaaccgtattagctggggatttttatagtgctctctattaccggacacttgcggaattagaaatgattccactcctcagagccttacaaagtggtgttcaagaaacaaatacagcaaaaactaatatttaccaattacatgttgcgacagatgaagaatatcttacacaacttgctttgaccaatgcggcgatttttgccaagtttgcgaagtattttatgaaggatgaaacatttattgctttaggttgtcagttctttttacttaaacgacttaaaatggaacttgcgacttatcaagaaattggtgcgtctaggttgaagcgtgcttatgaccatgggtactttgcgaaagaagctgtcactaattttgaaagttggttagtagcaattattcgtgacgtgaagatggaagtggaacgactaaaagaagagtctgaaccgctttctactatacttgaaaaaagaattattgaagttattaacgactgataaatagaaggagattcgggatatgacggaaactaaagaagaaaaagtacataaagtatttgagaagatttccccaagttatgaccgaatgaatagtgttattagttttaaactacatgtgaaatggcgtaaagaaacgatgaagctaatgcgtgttcaaaaagggacaaatgttctcgatgtttgttgtggaacggcagattggtcgattatgatggcggaagaaattggtccagaaggtcatgtgacaggacttgattttagtgaaaatatgctaaaagttggtcgtgaaaaagtaaaagaagcagatttgcataatgtagagctgattcacgggaatgcaatggaattacctttcccagataatagttttgattatgtgacaattggctttgggcttagaaatgtacctgattatatgcaagtgcttcgtgaaatgtatcgtgtcttaaaaccgggcggacaacttgcatgtattgatacctcgcaaccaaatattccaggttggaaacaagtatttaatgcttatttccgatatgtcatgcctgtttttggaaagttttttgcgaaaagttacaaagaatatagctggttacaagaatcaacgcgcgagtttccagggatggcaagacttgcggaaatgtttcaagaagccggattttcatacgtaagatatatttcacacagtggcggcgcaagtgcaacccactttggatttaaaaagaaggaacaataaggtggcaagcatgaaacttaactttttatacccgaatatgcaaaaagacattgacttagttgaaaaagaactaaaaagagctcttactggtgcggctgccgaaacgacttctgatgcggcacttcatctgttagaagctggtggaaaacgaatcagaccgatgttcgtttgtttatctgcaaggctttctcctgacgcggattttgaagcagtgaaaaatgcaggtgtagcgattgaattaattcatatggcatcgattgttcatgatgatgtggtagatgatgctgatttaagacgcggacgtgagacaattaaatccaagtgggggaaccatattgcgatgtatactggagactttctgtttgctaagtcgttagagtatatgacggaaattaaagatgttgctgcccacaagatgttatcacatgtcacagttgagttatctaccggtgaaatcgaacagctcaaagataaatataattttgaccaaagtgtgcgtaattatttacgacggatcaaaagaaaaacagcattattaatagcagctagttgtggtcttggtggtgttgtttctggtcaaagtgaagcagattacaagaaactatatcgtttcggatattacgtggggatggcgtttcaaattacggatgatgtacttgatttcgttggaactgaaaaagaactcggtaagccggctggagaagatttgagtcaaggaaatgtgacgttgccagtattttttgcaatggaagatccttttcttaaaaaacgaatcagccaagtaactgaggatacgcaagcagaagaaattgccgttttagtggaagaaataaaaaaatcaggggcaaaaaaagcagaagatgtcgcaacagcttatctaaaaaaagccgtagcaacacttgactctttaccacaagttcctgaattaaagccactgaagcaaatcgtccgtgttttagataaaagaaattattaacgtgagggaggattctataatggaacaaacttatgtaatggttaagccagatggtgtagaacgaggacttattggggaaattgtagcaaaaatagagaaaaaaggaattaagctagttgctggtaaattaatgcagattgatcggaccctcgcagaacagcactacgcagaacatatcggcaaacctttttttgaggatttaattggatttatcacttctgggcctgtatttgcgatggttttagaaggcgatgatgtgattaaaacagcacgtcggatgatgggaaaaacgaatccacttgaagccgatcccggaacaatccgtgcggaatacgcaatacatacgaatagaaatgtcattcatggttctgatagtcctgaaagtgctaagcgggaaattcagttattttttgaaccacatgaaattttaagttatgaaaaggcagtagatacttggatttaaaataagtaagagtttagggaaacctaggctcttttttcatagagaaaataccatttggcgcggttttttgttatgatgaaagaatgagactaaagtattgtgttctcgcttggcatatgttaagatattacacatatactttaaagcgctaaaatatcattgctagaatatctagcttaaatagaaaaaggagagttgttgaaatgagatacttaacggcaggagaatcacatggaccggggcttacgacaattattgaaggattaccagcaggaatgcctctacttgcagaagatgtaaataaagaacttaaaagaagacaaggtggacatggtcgcggtgcacgtatgcgtattgaaaaagaccaagtacaaatcacagcaggaattcgccatggtaaaacactcggcgcacctgtagcaatgtttgttgaaaataaagactggaaacattgggaaacagttatgagcattgaaccagttccagaaaaaaatgaaaaatctcgtcgcgtatctcgtccacgtccgggacatgcggatctagttggtggcatgaaatatggccacaacgatatgcgtaatgtattagaacgctccagtgcgcgtgaaacaactgtccgcgttgcagcaggagccgttgccaaaaaactgttgcatgaactaggtattgaagttgctggtcatgtacttgaaattggcggaactcgtgcgaatttgaaacgtgattacgcggtttcagaaatccaagaaacatccgaagcttccccagttcgttgtttaaacgaggttgctgcagaagaaatgatgcaaaaaattgatgatgccaagaaaaatggcgacacgattggtggaatttggtgaagttgttgtcggtgggtaccagctggacttggaaagctcgttcaatgggataaaaaattagatgccaaaatcgttcgtgcaatcgtaagtatcaatgcatttaaaggcgctgagtttggtgtcggttttgaagctgcgagaaaacctggtagcgaagtaatggatgaaattttatggagtaaagaagatggttacactagacgtacaaataatcttggtggatttgaaggcggaatgacaaatggtatgccaatcgtcgttcgtggggtaatgaaaccaatccctacgttatacaaaccacttcaaagtgtggatattgattccaaagaaacatttaatgctagtgtagaacgttctgatagttgtgcagtacctgctgcaagcgttgtagctgaggctgtagttgcttgggaagttgcagttgctgtgttagaaaaattcgatggtgatcgttttgatacacttaaaaaacatgtggaggaacaccgaaacttaacgaaggagttttaaacatgccagaaattacagtccgtgctaaaagtaaaacatatcctgtatatataaatgagttcgctttgacagatgttaaggaacaatggacaaaaagtttagctaaatattcccacgtgtttgttttaacagatgaacacgtggcaaatcttcataaagcgaaacttgatgcagtacttgctgatttacctgtagtcacttattatgtggcaccaaacggagaagaagcaaagacatttcgagtgtatgaagatgtgatgacaaaaatgattgagactgggcttgatcgaaaagccgttttaatcgcttttggtggaggggttattggtgatttaggtggttttgtcgctgcaacttatatgagaggaattccgttttatcaagtaccaacaacggttctcgctcatgatagtgcggtcggcggcaaggttgcaattaatcatccccttggcaaaaacatgattggcaacttttaccagccggaagcggttatttatgatacgcagttttttgcgactttaccagaaagagaaatgcgttctggttttgcagaaatgattaaacatgcgcttattagtgatcatgcgttgctaacggctttaatggacacgtttacggaaccaaaagacttttatacgaaggatttgacgccttttttacagcgtgggattgagattaaagcgaatattgttgctcaagatgaaacggagcaaggtgtgcgcgcttatttgaattttggtcatacatttgggcatgcgttagaagcttacggtaactttggcaaatggctacacggcgaggcaattacttatggtatgatttacgcgcttacgatgagtgagacggtttacggactggatttcgatttagctaagtttactacatggttagaacgtttaggttacaatacgacttttgatgtgacggttccttttagtaacatactggacaatatgcgtcatgacaagaaaacaacttttaatgaaattagtatggttttactagaagacattggtaaaccggttatttttaaagcagaagatgaattgatttttgacacttacaaaagcgtgatgcgaaatggaggggatttattttgagagcaattcgcggggcaacgacaatagaaagtaatacgccagaagaaatttatacagcaacgaaagaattatttgaggaaatcctgacgcaaaatgggataacggacagtgaaagtcttacatcggttattattacggtgactgaagatatttttgctgcatttcctgcgaaggcagtgcgcgaaactcacggctttgaatatgttcctgtgatgggaatgcaagaaattccggtgccgaattcgcttccaatgtgtattcgtttcatggtattcacagatttacataagccccttacagcaattaatcatgtctacttacacggggcaaaagtattgcgcccagatttagtgaaagaggaggatgcgtaatgaaatggaaaaaatctcttgcaggtctatcttcttataaacctgggaaacgcgaagaagaagtaatggcagagcttggtttaacaaaaattactaaactctcatcgaatgaaaacccacttggaacttcaaaaaaagtagcagctattcaagctaattcaagcgtggaaacagaaatttatccggatggttgggcttctagtttacgtaaagaagtagccgatttttatcaattggaagaagaagagttgatttttacagctggtgtcgatgaattaatcgaactgttaactcgggttctacttgatacgacaactaatactgttatggcgactccgacgtttgtacaatatcgtcaaaatgctttaatcgaaggggcggaagtaagagaaattcctcttcttcaagacggcgaacatgatttagaaggtatgttaaacgctattgacgagaaaacgacgattgtttggatttgtaatccgaataacccaacaggaaattacattgaattagcggatattcaagcttttctagatagagtaccgagcgatgttcttgtggttctcgatgaagcctatattgagtatgttactcctcagcctgaaaaacacgaaaaactagtacgtacttataaaaatttaattattactcggacttttagtaagatttatggtttggcaagtgcacgcgttggttatggtattgcggataaagaaatcatccgtcaactgaacattgtacgtccgccttttaatacaacgagtatcggacaaaaattagcaattgaagctattaaggaccaagcttttattggagaatgtagaacttctaatgcaaatggaattaaacaatacgaagcattcgctaaacgttttgaaaaagttaagttgtatccggcgaacgggaactttgttttaatagatttagggattgaagcggggactatttttagctatttggaaaaaaatggctatattacacgttctggcgcagcacttggttttccaacagctgttcgtattacaatcggaaaagaagaagataacagtgcggtaattgcacttttagaaaaattattgtaagtgtttggaggcgtttttgaatgaaagggacggtagttattgtggggcttgggttaattggcggttctattgcccttgcgattaaagccaaacacccagaagcacatatcatcgggattgacgtttcctatcattccttagaagttggaaagtctctaggagtcattgatgaaattggcgaaagtattttaatagatggaccaaaagcagatttacttattttttgttgtccagtaaaagaaacagaacagttattgacacgcttacctgggctgcgtttaaagaaaaatgtgattgttactgatacaggaagtacaaaaggaacaattatggaagcatccacggcgcttagagaaagtggtattacttttatcggcggtcatccaatggctggttcgcataaaagtggcgtacgggcggcaaaagagctattgtttgaaaatgcctattatttattgacaccaacaaaagacgtagcagaagccaaagtagctgaactcaaaacgtggctgtctggtacgaatgctaaattcttagtattatcaccaaatgaacatgatgaaattacaggtatgttaagccacttgccacatatcgtagcggcagctttagtcaatcagacgcaaagttttactgaggaacatcctgctgcattccggttagctgcgggaggctttcgtgatataacacgagtcgcttcctcggatccaagaatgtggacggacatttctattagtaatcaaaaaacattaacgaagcaactgaccatttggcgcgatagtatgaatcaagcgcttgaaatgcttgaaagtgaagatgcaaattcgatttatgccttttttgatggtgcaaaagaatttcgagattctctgcctgtccatcaaggtggcgcaattccatctttttacgatttgtttgttgatgtacctgactatccaggtgttatctctgaggtaactagatatttaggcgaagaagaaattagtttaacgaacatcaagattttggaaacacgcgaagatattttcggggtgttacaaattactttccaaacagatgaagacagggaccgggcgaaacgttgcattgaaactagaagtaactatacatgccactacgaataggagagaaatgacgatgaaattaattacaaataaacaaggactggttggcgaaatcacagtccctggcgataaatcaatgtctcatcgcagcattatgtttggggcaattgcagaaggaaaaacggtcattcgtcatttcttacgtgcagatgattgccttggaacgattaaggcgtttaaagcattaggcgtaaaaattgaagaaaccgatgaagaaattattgttcatggtactggctctgatgggttaaaacaagcagagggaccacttgatattggtaactctgggacaactattcgcttaatgatggggattttagcagggcgagattttgataccgttattttaggagatgaatccattgccaaacgtccgatgaatcgcgttatgcttccactgcaagaaatgggcgcaaaaatgcatggcaaagatggttctgagtttgcgccgatttctattatcggtaaccaatcattaaaacgaatggaataccacatgccagttgcgagtgcacaagtaaaaagtgcgattatttttgcagcgttacaagcagaaggtgaaacgattatccatgaaaaagaaaaaacgcgtgaccatacggaacacatgattcgtcaatttggcggtgaaatcgaaatggacggtttaacaattcgtgtcaagggcggccaaaagttcattggacaagaaatgaccgttccaggcgatgtttcctccgctgctttctttatcgtagcaggtttaatcacgccaggcagtgaaattgaactaacacatgttggtttaaatccgactagaacaggaatttttgatgttgtagaacaaatgggtggtagtttggttgtaaaagattctagcagaagtaccggtaaattagcgggtacagttgttgtgaaatctagcgagttaaaaggaacagaaattggtggcgatattattcctcgtctaattgacgaaattcctgttatcgctcttttggcaacacaagcagaaggaacaacgattattaaagatgctgcagaattaaaagtaaaagaaacgaaccgaattgacgcagttgctaacgaattaaacaaaatgggcgcggatattacaccaactgaagacggcttaattattcgcggtaaaactccacttcatgcggcaaacgtgacaagttacggagatcaccgaatcggtatgatgcttcaaatcgcggcacttcttgtagaagatggtgacgttgagttagaccgagcagaagcagtatccgtttcttacccaacattttttgaagatattcgctcccttttaaaataataatgactaccagtgctgtgtgctaaatacatcggcgctggtattttatttaagagaggcaatcactttttcttatgagggaagtaatggtataatagaaaaacgacttataattaaagaaggtgcagaaatggaattggctaataaaatgttacatgcgttagagcatgaagatatggcgcttgcgaagaaatactttgatgaagtagtgcaagcggggactgatgaggaacaatattatttagcagaagagttgttcgcacttggatttttagatgaaacagaagatttatacgaacttctgttagcaaaatataaagatgagggcgaattacttgtccgtgccgccgaagtagcacttgaaaaagacgatatggatgctgcgcaagattatttagaaaaagtaaacaaagaagatgaagcctacattgaaagtttactcgtattagctgatttgtatcaaatgcaaggcttgtttgaagttagtgaacaaaaattacttgaagccaaacagatggcgccaaatgagccgattattgattttgctttaggggaatattatttatcacaagcccgattcgcttctgctgtacagtcttatcaaaccgctgtagaagcagggttaacgattatctcaaatggcgccgtgtctgtatatgaacgtattgccgaagcttttgcagctagcggagcatttgaagaagcgctaccctactatgaacgtgccttagaagacaaagaatcggtcgatacactttttggaatgggattaacggcttatcaggcaaaagattatacgaaagcaattcacgccttggaacatttgcgcgaacatgatccgtcgtacacaacgttatattcctatttagcgaaaagctatgaagaaaatggggaaccagaaaaagccattgcagtacttagggatggtttaacgcaagatgaattcaacaaagaaatgttcctagaagcagggaaactcgctgttacgcttcgtttgccggaagaagcagaagagttttatcgtcaagcgattgtgcttgatgaagagttctcagaagcgattatgcaactgaacaaattattacttgcgaaagaaaactacgaaggtgtcattgaattagtagaagggctcggggaagaagttatttctgaaccacaaattttctgggacgtaagtgttgcatatcaggaaacagaacaatataataaagcaaaagcaaattatgaactcgcttatccacactttacgaataatcctacgttcttaaaggaatatggtttatttttaagagaagaaggcgaacacgcgaaatcacaagaagttttgcgtagctatttagaacttgaaccagaagatactgagattttatctttatttgattgatcaaaagaatgaaggaagggactgaggaaagatgaaggcatccatttcaatagacgagaagaaagattttattcgctggtttttaaacaaacaccagatgaaaactagagaagcaatgtgggttttaaattatattgctggccatgatcaaattgtaaaatatgttcattttgttgataatttggaaggatgtgcgcgtgggctttcgcttagtgctcacggggttgaatccgaaccattcctatttttcaaaggtagcataatgacaacagatccagaaaaagcttttcatgatattcggctaaattgggacgaggaattatatgtcgaacttcattttgaagaggcaatgacctcacctgaatatgcccttgttcgtgaagacaatccttttgcggcagtgaagcttgctgaagaggaaaaagaaatggcggatgcgcttatttatcaatctgtgcaccaattttcaagagaaaaattattacaacaaatcgatgaagcgcttgatactcgtgatgaagcgacattccataagctcgttcgtattttacagcaaatggatacagaaaaagaataagaaataaatcctagttagtaataaaatggagtgaaatagtgcttcattttattgctatgctaggattttttaaggagttggaatcatttgttttatagtttacttgcaaatcgctcttttttacgattgctgtttttcggtaatttactaggggcgatttacggatacatatggtatttaccacaattacaaattacagagccgcgtttttggctatttgtcccagatagtccaaccgcgattctattcttcactctaactttagtagcctttcttgccaaaaagcactggccgctaatggaggcactggcttttgtctgtttagtaaaatatggtttatgggcaattggcatgaatattttttatatgtttgagcaaaagacgattgtttgggctggtgtcgttctaattttaacgcatggttttatggcgctagaagggattttatatgcaccattttatcgtttccgtatagggcattttatgatagcggctgtttgggtgtttcataatgatgtgattgattatttatttggccaaatgccgatttatatgggattagaaaaatacttacctgaaatcggttatgcaactttttggctaacggttatggttttatggcttgtatatgataaaacgataaaaaaaggtcaccgttcattagaatttcctcatcatgagtgaaagatgttgagtcttagtacgggttcatctatactaagagataaggatatttaccgaaaaattgtagtaggaggaagatgattagatgtcgtttagtcagtatattatttattttattatcgttgcagcaatccctccttggggcccagaatcgagttaaaactacctatgcccagtattccaaagttggtgtggcaaatggtttaactggtgccgaggttgcacgtcatattttggatacaaatggattaaccaacgttcctgttcatgaaacaaaagggatgttaagtgaccactatgatcctagaaaaaaagccgtgtttctttctgaagctaatttccgcggtcgttctatcgctggggcagcagttgcagctcatgaagtaggacacgcgattcaagatcaacaggactatgcgtttatgcgttttcgttccgcactcgttcctgtaacgatgtttagttcgaatatttcttgggtgttcctcattatcgggatgctcgcaaatgtagctagttttatgttattagggattattttgatggcagtaggggtgcttttccaattaattaccctgcctgttgagtttgacgctagtaaacgtgcgcttgttcaattagaaagtggcggactagtatcatcatcggaacttccacaagcgaaaaaagtccttagtgctgcggcgatgacatacgttgctgcaatggctgttgcggtacttgaacttctaagattactcctcatttttaccaatatgaatcgaaattagaataaacgacgaacctgagaattttctcgggtttttgtttggtgaaaaaagcttggcactgagccgaatgcttgctatacttatactcggataaagtaaaggagcgggataatggattatgatgtaattgtcattggtggcggaccatcaggacttatggcagcaatcagtgcagcggaaaaaaacaaacgagttttattaattgaaaaaggaccgaaactgggacgtaaattaattatgtctggtggcggacgttgtaatgtaacgaacagacgaccagcagaagaaatcattaaacatattccgggtaacggtcgctttttatatagtgcgtttcatgcgtttgacaatgaagatattattcgtttttttgaacgacttggtgtggcactaaaagaagaagatcacggcagaatgtttccagtatcaaacagcgcgcgttctgttgctgaggcgatgattcagcggatggaaaagcttggcgtgaaaatctatatgcaaaccgctgtgaagcaagtggattacgaggatggccatgtaaaaggtgtgacgctaaaagacgggcaagagatttcagcgagcgcagtaattgtcgcagtgggtggtaaatctgttcctcggacgggctcgacaggagatggctatgcttgggcgaaaaaagcaggacacacgattacagagctatatccgacagaagtgccgattacgtccagtgagccttttattaagcaaaaagtgttacaagggacgtcacttcgggatgtatctttgtctgttttaaatgcaaaaggaaagccgattattacgcatcaaatggatatgatttttacccattttggcgtatctggaccagcagcacttagatgtagtatgtttgtccttcgtgaactaaagaaaacgggcgcgggtacggtgaaaatgcgtcttgatttattcccgaatgtatcagctgcggaactttcgaaagaggtttataagctgctagaagaaaacccaaaaaaagcattgaaaaattcattaagttcgcttttacaagaaaaactattattgtttttactggaaaaagcagaactggatgagacggctgaatacaaacaagtaagcccgaaaaaaattgagcaatttatccagttattaaaggatttcacttttgaagtaaatggcacgcttgattttgagaaggcgtttgtaacaggcggcggggtttctgtgaaggaaatcaaaccaaaagagatgcagtctaaattgatggaagggttgtttttctgcggggaaatacttgatattaatggatacacgggtggttataatattacgtgtgcattagtgactggacacacggctggagcttacgcggcggaagtgtcaaacatataaaaaaagtaccaagtcttattttctaaggcttggtactttttattattaaccgattaatttttcgtggaacattctttggcaaagttccattttttgttcttcgtttagatcttttgtatttaagcagtagccgctgatacgtaagattactgggataccagctttaattttttcgattacttcgtcgtggttaagaacgtttaagttgatgtgttgaccaccttttgtaaagtaaccatcaagaataccaacaaggttatggtattgttcttcggttgttttaccgaacatttttggagctccttggattgttaaggaaattccatcatttgcatagtggaatggtaatttagaaagactggcaaggttatctaagaaaccaccttttgctttgttagaagggttagctcctgggctgaagaattctggttctttgatgattttaccattttcatcgaatacaggtcctttatgcactggggagttaccacattgtttagaataagcaacgtttgaagtgattgttaaaacagaaacagttgcttcactatctttgtaaagtttatgggagtctaatttgtctttgaacatttttagaaccattacggcaatgtcatcagcacggtcatcattttcaccgtaacgagggaagtcgccttctacttcatagtcatatacaaagccatcttcatcgcggatggtttttactttggcatatttaatcgcacttaagctatctactacattcgcgaatccacaaataccgaatcccatgttggcagttacttttgatggtaggaaggccatttgcatgctttcgtagttgtatttgtctgtcataaagtgaatgatgttcattgcatctacataagtgtctgttaaccagtccattgatttatcgaatttatctagaacttcgtcgtattcaaggtattctgttgtaattggttctacaacgtcgaatacttggtttttatgaagatcatctttaccaccgttgatagcgcctagaagacattttagtacgttgacacgagctccgaaatattgcaggttatgagtttcacctttgtctttgtctgcttctgggttaagtgggctcacacaacagctgatacattgcatatcgccgtagccttcttcttgcattaatttatcattttcatattgaatggaggaatgttttacactcattttcatacaatattctttaaagctttctggtaaacgagcatcccataggacagttaagtttggttctgctgagtttcctaggttatctaagcagtgtaagaaacgataatctgtttttgtaacgcggtgacgaccatctgcccccataccagccatagaagttgttacgaatgttgggttggaagcgtaaagctcgttgtaaccatctgttcttgcaaaacggaccattcttaattttaaagttaattgttcgattaattcttgtgcatcgaattctgtgataattcctttttctaaatcacgttggatgtaaatatcaaggaaaatcggaaatacgaccaaatgagcttgcagcaccgtttgcttgtttgattgaagcaaggtagcccatgtatgtccattgtacagcttcggttgcgttttcagcgggacggccgagttctaagccatattcgttacctaaaacgattaagtctttaagtgctttgatttgtaaccagatttcttcacgtagacgaatattttcatcagaagaaatcgcgatttttttcaaatcttgttgtttttcagcgattaaacgatccactccgtaaagtgctggtttttggtataagccgatgattcttccgcgagagtatgcatctggaagaccactaacgatatgcgagtgacgcgcacgtttaatatcatctgtatatgctctaaaaataccatcatttgcagtggaacggttttttacgtaaaagtcatgtaattcttggtcgatagaataaccattgtctgttaaacattgttctgcagttctaagaccgccatttggcataaatgctaatttgaaaggtttgtctgtttgtaaaccaacgattacttcattttctttgtccacgtaaccagctttgtgagaggcaacgtttgatacgattgcgttatccatatcaagaacgccaccttttgcgtccatttcttctacaagtttatttattttttcattaagtttagttgttcttggtgtgctcttttctaaaaagctttcatcgccatcataaggagtgtagttgtcttgaacaaattgtcctacactaatgttttcttgccatgcggttcctttaaaaccatcccatgcttttgtcattattatttcctccttcaattgtgtttcttttcacttacaaccagaaacttgttcttagaatctttcttcattgaacagcatactcctttgtgaaaacgaaaacaatataaaaatggaaagaaaataaatttcttttatataactaaaaaaggctttgaatggctgtgttaatacagttttttatagaaaaaaagcctagcgttaaggctagacttctttatttgcagtcacttcttctaaaaaagtatcgactatgctatctctttttaagacaaaattagggttggcacggcttgggtgaacgcgattagataacacgatgaggcttgcttgattttgtaaatcgagcgccataaaagtgccagtaaatcctgtatgatataaaacagagtcgccgcggagatcccagccaaggccgcgcgtccggtttagcccaggcgtatgattaatttgcattatttgtagagttttttcagtaagaatagggtcgccgttttgtaaaattagcgcatctcgaaattttgaaagatcagcgagggtgctaaaaagtcccgcgtgtccagtgcccgatttggcggtccaggctttgaaatcgtgcacatcgccttgaattaaaccgcgcgtttggtctagttcagttggaatgacttggcttttatcagttggatgaaaactagtgtgtgacattttcagcggttctaagatgtttttttgaattgattgctcataatttccatcaaatttactaatcaaataaccgagcaagagaaaattagcatcagcataggtgacctgagttccaggtgaattcacttgaggcgttgcaaaaacatagcttctaacatcttctttagcacccattttgtagtttggaatattttgtgcaaggccagagctatgggtgagtaaatgtaaaatagtaacattctcgtacttaaaatcaggaagataggcttgtactggatcttctaactggaaatgtttttgttcaataagttgtaatacacgtgttgtcgtagcaattaccttggtcaaagaagcaatatcataaatgttgtctgtcgttctagggaggatttgcgcttcagggaaaacggattttaaacccattattctattttcttcgaggttatttgttttgatttgatagctaattcctggagtggacccgttttggacaagttgatctagtaattgcttcgttttataaaacatacttaaactcctttataagttggttgccacatctcacgttcgacagcttttgtgacacttgctaactcgacttggtggatattttctttgattgcttggttcgctaccgcaatagcaaccgcgcgggaagtttctctaagtgtacgaacatgtggtaagagggcagctccaagttcgtttgtagaaatttgatcactaacggcacttgatgcagcggctagcattccgtctgtaataaatttagaacgtgtaacaagtgcgccaagtccaagcccagggtatagaagggcgttattagcttgaccaatttcataggtaatattttgataagtcacgggtttggatggacttcctgttacgattagcgcttttccatctgtccatttaatcaagtctgcggcagttgcttcagctaatttggttggattagacagcggcaaaattgctggtcgttctgtatgctccgtcattttttttacgatgctctctttaaaggctccagtaacgccagaacagccaattagcattgttggatgaattgcttcaactaagtgttctaatgtatcagtaggcacgctagcccagtcagaagcttgatgcgcatatttcttttgaccatccgttaaatcggtcatattatcaagcactaaaccactacggtccagtaagtaaaaatgtttttttgcactttcaaaaggaagaccagtttcgcgcatcaattgaccactgagttgatcagcaataccgatgccagcagttccagcaccgaaaataataatcttttgtttgtttaaaggaatatttgaaacgttaattgttgcaagagcagcggcaacaaccatcgcgccagttccttgtatatcatcattaaacgtacaaattttatcacgataattgtggaggatacgacttgcatttgcccggccaaaatcttcccagtgaagaatagcgcttgggaaaacatcactcatgacttccacaaattgtgcgataaaagtatcgtaatcgctttctgacaggcgcggacgtttattccctaagtaacgcgagtcttcaagtagtgttttattatttgttcctgcatcaattacaactgggagaacacggtcaggagaaaggccagccgcaaccgtataaactgctaattttccgactgctattttgacgccgttcacgccccaatcaccaatgccgagcacgccttcaccatctgtaatcacgatcatatcaatatttggattgttttgcgcataattttcaacagatgctcttagtttttcgggtgtaaaagcatcaataaataaagcttcatcaggcgcggtatagtctgtatgataatgtattaccgcatccccaatcgttggcgtataaataattggcaaatattcgctcacgtttttggtaacaacgtaataataaagtgtgcgattttcgttatataagtttgttaaaaattggtgtttatgtagaggggattctaagttttctagttggttttcgatgcgcaaagcttgttgttcgattgtttcgataattggcggcagtaatccgtctaatttatagtttaatctttcctcacttgtaaaagctgttcctttatttaatagtgggttattcatatagtcaaaacctgattttaaagtcatttcaagcactccttttcattctattctattttacatggggggaaggagaataacaactgattcaaaaaagaaaacctgaaaccaatcagattttctttttttacatattaatgaaaatagtaaccttgtgcataggggatgccaatttcttgaaggaactttaactgttcttttgtttctactccttcaacaatcaaggatttatgatgctttttgacgtagtgatgaagttgctcaaagaagtttctcttgccgtcactttcaaataaatctcgaagtaataagcgatcagtttttacaaagtcagaatggtgcgcaaatacgcgatgcaagtcggcgtaacctgagccaaaatcatcaatagcaaatttagtctcatgttttttctggaataagcgtagttgtttttctaagtcgttcattcgttcttgcggtaacttggatgtttccaaaaattcaaaaactattttcccgttatcaagaagggtatcgtgtagttcttcttgattttctaaaaatgtatcataggaaatattgacaaataatggcgtgttttcacctttttcaaagcgtttgactgcattatgaagcgtgagcagttcaaaagctttttgctgaccttcctgttccgcttcttcaataaaatcactaatggcgttccagtgatttgtttttaagcgggtgagtgactcatatccgaaaacttgtgtatttgaaacagcaacaatcggttcgtatattgtatcaaagaggttttgatcaataatctcacttacggagggctttttcatttgtccaacttctttccgttatttcttaagagttatttctttatttatataatcgaaaaaatgggtcgtttcaggatttgacgtgtccattttctctaacaactctttggtgattttaccatttttagcttgatttgtcttgttaaaatactgtgtcaaaaaggcataaacggcagtagattcgttttcagagttcggctcttttgtttctctatcatatctggcataaatttttccttttgaagccagttctgtttgtaaaaattggtcgaaatttggctcaactgtaccattttcgtcataataggcgatagctatgagcatttgatcaatcatattgacttcgtttgcgtcagcattttgaaattgtccattttgaaacacttctgtaaaaaaaggagtggcgctgacgttcttgataggagcataggcttttgcgctatagttaatgtggcgcattgcttggatatttagataacttaaatgaagtgtatctgcttttttcttatgaacaaaatcatagaaatccactggaactccttgaacggcgctatattttttcgtgttggagataagtgtatcggcaagggtttgatacgcttgatggtcccattttttactcgcttgataaagtgcttctgtaatccgaaaatcatctacaatagcgttggtagttgtgctatcagtcgcttcccatttaataaaattgtctgttgttataaaatgtttttgtaaagtagccacttgttcttggaaagtcttgctatcattcacttctactaaatactccatataaagtccgatgctctcggctaaataatgcggttcttgggcatttttgtaatcaataattaaaccgtttttggtcatataattttcttttacataagtttgaaccgagcttgaagtgggttttgtctctttaggtgcgcttagagtatctttttgttctgggcgaaggaaaaagtatatacctgtgccaattaagagcagtaaaaaagtgataataattgttcgcttcattcgctttcctcctgatgaatggcaatttggttacgcccattttgctttgcttgataaagtgcttggtcagcagcctcaaaaagtgattcggtcgttctatagttgtaccccatagaagcaaccccgatggagaccgttacattaccactaactggattgtacggaaacttagctcgttcaatttcatcccgtaaaaaatcagcaattaaggcagcttgttctgttccaacattttgcagtaaaacagcgaattcttctccgccaattcgagcaaacatcgttcttggtggaaaggttcgatttttgagaatgctactaaactgcgctaaaacagtatttcctgcttgatgtccatgaaaatcattaatttctttaaaatgatcaatatcaataataaataaggataacgctttttttcttttttgagatttattaaaaatccaagcaaactgttgcgtgaaaaatcgcatgttaggtaagttggttagactatcggtcatcgcggtttcggtcaagttttggataactaaattacttttatcaatataattgcacgcataaaataccagcaaagcagtgacgaaaaatagcaggaagtattcgacaatttcaacgccccgcaaaattcgtccttcatcaaaattattcacaaaataatagaggattgctgggaagttcaaaataattaacgcaataaattttgaaaagcgttgttttttccaaaaagtaataagtaaacaagccgcaaaaataagtgtcattaaaataacgtagcgactagtaacgggcgatgctatatcaaaactaattcgtccgaaaagcattacgacataagcaacaataagcggagtacgaccagcaaatacacctgtaaccatcaatattaaaatccgcatattcgtataaataacaggattatgttcatatgcaccttcatagataaaataaatccctgctaaaccataataaacaccaagaagaatagagagaaaaaatcgcctattaccattttggaaccaattaggacgatattgtcttatttttcgaaaagacataccttgaataaaaaggatagcaagaaagagcgctaaactgtctatgtatgaattaactagctcgaacaaatggactcatctcctttttattaaataactggatctgttgtttcacgaatatgtacttgatttcgtccatttcgttttgcattgtaaagtgcttgatctgctgcatgcattagttcgttagcgtttggataatttttaccatcataatttgcgataccagcggaaatggtaataaccgagccagttgttgctatcggaacatcaattttctcgactttacgccggattttttctgctaagtgttctgtttcgctgacattaatatttggcaaaataatagcgaattcttccccgccaatgcgagatataaccgtatttggtggaaaactaatttttaaaagcatttggctaaaagtagataaaacaccatttccaactaaatggccatatgtatcatttacccgtttaaaataatcaatatcaataataattaaacttaagttcgatttttttaaagtagcatagtgaaaagcagcttcgaacgttttttcaaagtgacgaaagtttgttagaccggtaagtggatcaagaatagtcgattgctgcaattcataaatcagcttatttgatgtatcaatataataagccgctgaaataataataaaggtaataaaaaaagaaaccaagaaatagagtgtccaaactggcacatcatgtattgtatatgtaagatgtattttttgatgtaaataaataagcattagtggaatggcgctaagtttgacgagtactactttttgaacagagctaagacgtaatttagctacttccatacaaacaaagtgaaaaccaataattaaaaacacataaattaaattggcaaagagagcatcaccaagaaagagttttcctgccacaatgagtactaacgcgatagtagctggacccgctgatgaaaacaagtgtaaaacaattaaaatatctaataacatatctgtataaatcccagaatccgtcccaggtaatccacggacaataaaataaacacctaataagccgtagtaaatgcccagtgcataattaataatttcatttgcaaatttaatttggaaccaagcaggctttttttctctaattgaccgcagtgccattccgtgaaaaaaaagcgctgataaaaaaagcgccatgctgttccataatgaatcaagaatatttggcataaaaaaatctcccatatctcagcataatgaatcagctgaaaagttaatataggcagaataaaaaaataaatgaatttttagctgagacgcagtacaaagaaccaaccaatcggcgaaagcgatctctaagaggatatgtggtaatgacgacgagataagccaaaatctgcctttttgtaattaaagctggatttcagtacaatggatagaatgaagtagaggatttttagtagactgtaaacttaactattttcacatattattacaaagagttataaaaaagtcaacttgtgtcacaattgatatagaggggtgtaacaatgcaaaaaatagtgataatcggtggcggaattgttggagccagtgcagcatatttactatcaaaagaaaatgttcaagtaacgctaattgattctaatgaacctgggcaggcaacgagagcagctgccggaattatttgtccatggctttccaaaagacgaaataaatattggtacgaactagcaaagaacagtgcggcgttttataaagaaattgcagaaagtcttagtgaagaaactggaagagattctggttataaacaagttggcgtgctcgcacttcggcaaacagaggaaaaagcaacggaactttttaatctggcaatggaaagacaagcaggagcaccagtaatgggtgatattgaaaaattatcagaagccgaaacaaagcaaaaattccctttagtgaaaccgggatttagttctgtttatgtaagcggggcggcgcgggttaatggcggtttgttttgtgaaactttacgctatgcagccaaagaaaatggtgtggaaatcaaaactggtttggctcatttttcaccaaaaggggaggttttggttgatggggaaaaagaaagttacgataaactaattatttcagcaggtgcttggctacctaatttattacaggaggcgggctttcatacggatgttttagcacagaaaggtcaattgcttgaacttgattttagtgaatacgaaacagcagaatggccagtgattttacctccaagtgcaaaatcgattgttccgtttgataatggaaaaataattgtcggggcaacacatgaaaaagctgctggcttcaatatagagccaacagcggaaggtaaggcagaaatattagcagaagtcagtaagtttatggagggtgagttggaacataaaatagctaatgtggcggttggaacacgaccttatacgccggattttgcgccactaattggacagctacctggttttgactcgatctttttagcgaatgggctgggtgcttctggcttaacaactggaccatatgtcggtaaactgctagccgatttggcactattaaacacaaccgatttagctttagaaaattatgatccaagaaaatacattagtaaataggatttttgttttcgtcgagtgtgaaaccttcgcccatcacatcatgaacaacgctcactgaaacaaaagcatgagggtcaatcgcttggacaatattctttaattgcacaatttcatttttagcaacgacaatataaagcacatcttgttcatttttagaaaagccaccacgaccttcaagtactgttacaccacgattcatcgagagcattacatgggaagcgatggcatcattatctttagaaataatcaaggcgccgcgtgcagcataagcaccttcttgaacaaaatcaatgacgcgtgaaccgatgaaaacagcgacaagtgtatacattacttggcgaacatccaaataagataaagaagcagcaagcactatcgcatcaattgcgaagagcgtacgccccatactaattccttttgtatgattcagtaatttggcgataatatcactaccgccagttgtaccaccatatcgaaacacaagcccaagcccaattccgctaaaacctccagcaaaaagggctactaaaagtaagtcactatgtaaatctaatgtataagggatacgctggaaaatccataaaaataaggaaaggctaacagtaccaattccagtataaatgagggaacgactacctaatacacgccaacctataataaataaaggaatgttcaagactaagttggagtaggcggggtcaatttgaaagaaatgaagcaggaataatgtaacccctgcaaggccaccctcaccgagattatttgcgatattaaaattaactaatccaaatgcatagattgccgtaccaagcataataaagcaaatatttttcgtgcgcagtgtttttaacatagcttttttcctccttggaacctatttaataagtaagtaaaaaatcatggacttgtatgtatttgtttaggtataatgaaatgaagttaacaattagacttaaaaccaattttagtttaacacaaaaagggggaaaacctatggcgaaaaccatggcagaaatacaaaaagaagtggatgatttcattggtggattcgaggaaggatacttttccccactagcaatgatggcacgaattactgaagaaaccggcgaactagctagagaaattaatcattattatggtgaaaaaccgaagaaaacaagtgaacctactaaaaccgtagcagaggaacttggcgattgcctttttgttcttacttgcatggcaaactcacttgatattgatatggaaaaagcacacgatacggtcatggcgaaatttaaagaacgcgataaagaccgctggacaaaaaaggaggacaaatcaaaatgaaagtagcagtatctggatttaaaggaagaatgggacacgaggttgttaaaactattttaagagaagaagacttggaattagttgctgtgcttgaccatgaaccaaaagaaaaaaacatccgcgaaattgtggagtttagctcgttagatgtaccagtgtatggcgatttaagcgaaatgttagaagaaataaaaccggattgcgtcgttgattttacgatccctaaagtagggtatagtaacacgaaaacgattttagaacacagcgtacgtgcggtcgttgggactacaggttttacaccagaacaaattagtgaactaaaatcaattgcagaatcgaaaaaaatcggtgcgttaattgcgccaaactttgctgtaggagctgttttaatgatgcaatttgcacaaaaagcggctaaatatttcccgaacgtcgaaattattgagttacaccatgataataaactagacgcgccaagtggtactgctgttaaaactgcggaaatgatggcagaaacacgtgaattcgttaaacaaggtgcagcagatgaagtcgaacttattgaaggtgctagaggcggagaatatgaaggaatgcgtatccatagcgttcgtttaccaggccttgttgcacatcaagaagttatttttggagcggaaggacaaggcttaacgattcgccatgactcatatgaccgaatttcctttatgtctggtgttgctctttctgttcgtaaaacaaaagaacttgaaacacttatttatggcttagaaaatattttagactaaggataggtgaatgagatgcatatcgcattaatcgcgcacgatgaaaagaaggatttgatggttggatttgcaaccgcatataaacatttgctcgaaccgcatcagttgtacgcaacaggcacgactggtttgcggattattgaagcaactggcttaacggtgcatcgttttaaatctggtccgcttggtggcgatcaacaaattggtgcgcgcatttctgaaaataaaatggacttagttattttcttgcgtgacccgctgaccgctcagccacatgaaccagatgtaagcgcgctgatacgattatgcgatgtatacgaaattcctttagcaactaatattggaacagcagaaattttaattcgcggtttaggagctggctttctagattggcgagatttaagaagaaacgatgaataaaggagcgatgacagatgaatgacgtttttctaaaagcgcttcctgttttgcaaaaattgactactgcgggatttgaagcgtattttgttggcggatctgtcagagattacttactaaatagacctatttccgatgtagatattgcaactagtgctttcccagaagaagtaaaggagattttccagtccacttatgacactgggattgcgcacggaacagtaacagttagagaaaacaaagagtgctatgaagtgaccacttttcgaacagaaggcacttatgaagattttcgacgtcctagtgaagtgacgtttattcgttcgctggaagaagacttactgcgtcgtgactttaccatgaatgctattgcgatggacgaaaattttaaattacacgatccattttccggacaattagcaattcaaaataaagaaattaaagcagttggtaaagcgtctgaacgtttccatgaagacgcgcttagaatgatgcgagcagtgcgctttctaagccaacttgattttcagttagataaagaaaccgaaaccgctctgacaaatcaaattgccttattacagcatacttctgttgaaagaatcactgtcgaatggataaaaatgatcaaaggccaagctgtaaaacgcgcaatagatttacttttaaaagtagaaatggaaacctatttgccaggttttaaaggtgaaaaatcagccttaatggaatttgctagttggaactgggaaaaacggacgactgaaaccgcgatttggcttggacttgtaattgccgttaaaccgagtaatattaccgcatttttaaaagcgtggaaattaccgaacaaaaccattcaacttgtgaataaagcttacgaagctgcccttaatatgaaagaaacttggctaacagaagaactatatcatgctcaggaagcagtttttttgttagtaaatgaaataaataatattcgtggtcaaagtgacaaggaagatgaactgaaaaaagcatacgaattacttccaattcactccaaaaaagatttagcgattacaggtgctgatttactcaaatggacaggggaaaacgctggtccttgggtaaaagagacgcttgataaagttgaatgccaagtattactgggcaaaattaacaatgaaaaaaatcagattaaaaggtggctaggctatcatgaagaataatcgggaaaaattgcttgcattatttacagaaagtgatggcgcttatttatccggtcaagaaattgcggatagtctaggttgctcgcgtacagccgtttggaaacaaatggaagcactacgtaaagaaggttttgaaatcgaagcagtcagaaatcgcgggtatcgtttatcagcaacagctgaacagtatacgaaagacgcgctactactcggtttagaaacaaaatttatcgggcaacatttagaaatatatgaatcagtgaactccacgcaaatcatagcgcaccaacaaatgaattcaagcccagaaggaaccgttattgtagcagatgaacaaaccgctgggaaagggcgcttgcttcgtccctggaattctaaaaaaggggaaggcatttggatgagcgtgatcttaaaaccgcaaattccaattcaaaaagtaccccagttcacttttatcgcctcgctcgctattacagaagcaattgaaaatatcacgaaactcgaaccgaaaatcaaatggccaaacgatatttatattggtaaacgaaaaatctgtggcgtactaacagaaatgcaagccgaagcagaaacaattcatgcggttattattggcatgggtattaatgtgaatcagcaagagtttccagaagaaatcaaagagaaagccagttcacttaaactggaactaggcgaaagtgtatcgagaaaagcattattacaagcaatactaacttctttagagaagtattatgaacttttcttagataaaggatttgcaccgataaagttattatgggaaacaaaagcgattccttttggtgaaaaattaacagccagcacgacaaaaggaaaaattcacggacaagtaaaaggtatttctgatgaaggcgtgctcttacttcaagattcactaggcgagattcattcgatttactcagcagatattttgctggataatgaaaaataataaaatcgctatcaaaagattgttttgaccctaataaaatagcctaaaacatatcttttaactcgaaaatacagtgtgaaaatcactttttcgagtttttcttttttgagaaaaatctagtacaataagcacgaaggagtcgttgttatgaaaaaaattatattactattagcactgtttaccgtagttctcactctaggggcatgtggtgataataaaaaagaaacagaagagaaaacaaagcaaaccgaaaaagagagtgcaacctttttaaatacaatttccacgaaagactttaaacaaaaaatggcggacaaaacaactggctttgtttatgttgggcgtccaacttgcgaagactgccaagcgttccaacctattttaaagaaagaacttgaaaaaagacaaccagatcaaaaaatggcttattacaatactgacaaagcatctgaaaaaagccgagatgatatgattgcgcttttaaaaaagatggacattgattccgttccgacaatggtatatttaaaggacggtaaagtagcatctacttatgctgcaacagatgaaccagcgaagttaactaattggatgaataaagtgagcggagaggtttcagagtaaacctctcttcaatttacatactttaagtaagcatctatttatggtattatacatatggtagcaaagaatggatgatacctttaccggatcatactaacgctacttacaaaaatttgttttttgccttgattaattcatttaacagggacgaaaaggagctaagaaaatgaaaaaaccagtagacttttttgctatgaaggaaaacggagaaaaaatcacgatgattaccgcttacgattatccttctgctaagaatgtagaacaagcagaagcagatatgattttagttggtgattcacttggaatggtagtattaggctacgattcaactgtaccagtaacaatgaatgatatgattcatcatacgaaagctgtgaaacgaggggcgccaaatacttttgttgtaacggatatgccttttatgacttatcacggctcagtagatgaaactattcaaaacgcacgtaagattattcaagagagcggcgcacatgctgtaaaactagaaggcgcaggagaagttgttaacaaaattgctcgtttgacagaagccggtgcaccagttgtcgctcatcttggcttaacgccacaaagtgttggcttaacgggaagctataaagttcgcgctaaatcagttcaagaagcgcaagagttgattgacaatgcgttagcggttgaggcagcaggagctattgctattgttcttgaggcaattcctcgtcagctagctgaaaaagtaactaaggcacttactattccaactattggtattggagctggtttagaaacagacggtcaagtacttgtataccacgatataatcggttatggtatcaatcgccgagcaaaatttgtgaaagcttatgcggatattgacgaaactattgaaccagcacttaaaaactatgtgaatgacgtaaaagaactagcgtttccagaagtgaaacatagctttacaatggccgaagaagacttaaaaggcctttatggaagggaatagccaatgttaatcattcgaaatagacaagaacttaaagaagcaattttaaaacaaaaaaaagcgaataaaacaatcggtttcgtgccaacaatgggttttttacatgaagggcatatgacgcttgtaagccatgcaagaaaagaaacggattttgtcgttatgagcgtttttgtaaatccaacccaatttggtcctaacgaagactttgacgcctatccacgcgatgaagcgcacgatgcaaaacttgctgaagaaggtggcgtcgacattttatttgtgccgacagttgaggaaatctatcctactgaattagcaacgaaattgcacgtcattaaacgcgtttctgtccttgatggtgctgacagggaaggccattttgacggtgtagttacagttttaacgaagctatttcatttagtgaatccagataatgcttattttggtcaaaaagatgcccaacaagtagcggtagtttccggccttgtagaagattactttttcccggtgaatttgcgaatcattcctacagttagagaggctgatggacttgcgaagagttcacgaaatgtctacctcacagaaaccgaacgtaaagaagcgccagttattcacgctgctttacaacttggtcggcaattaattgattctggcgagacagatgaagcgaaaatagtgcaagttatgacagacaaaattaatgagcaaacatctcacgagaaaatcgcctatctagcgttatattcttatcctgaatttactccggtaacagattggactaagggcataattatagctgcggcagtgaaatattcgaaagctcgtttaatcgataatgaattaataaatgtgaagaggcggtaaaaaatgtttagaactatgatgaatggcaaaattcaccgagcgactgtaacagaagccaatctgaattatgtaggaagtattacgattgactctgctattttagaagcggtggatatgcttccaaacgaaaaagttcaaattgtaaataataataatggcgcaagaattgaaacgtatattatcccaggtgagccaggtagtggtgtgatttgcctaaatggagctgctgcaagacacgtccaagttggcgatgtggttattatcatgagctacgggatgtttacgtcggaagaagcaaaaacacatgaacccaaaattgtggtattagacgaaaaaaatcatattgaaatgattcttccagaagaaaaagcgcatacgactttataagcaattcggggagcttgagcggatttctgctcaagctactcgtttgtttgaaacgttatttttgaataaaagcagtgaaggaaagaggtggagcaaatgaaaaagaagcgttatattgtcgttgatttagaaacaacaggaaaccaagcttcacgagaagaccgcattattcagttcgctgcatgttttgttgaatctggaaaacgcctggaaacatactccacttttttaaatccagaaaagccaattcctgcttttattcaagaattaacggggatttctccaaaagatgtgaagaatgctccactatttgaagatgtggcaccaattattgctagtctgttagaagatactattttcgtagcgcataatgtctcgtttgattggacttttttagaacgagaaatgacacgtgctggaatttcattaggcaaaatgaaaaagcttgatactgttgaacttgcgcgtattatgtatcctgggattgatagctataaattacaagacttatcagatgaatttggtctagggcatgacaaaccacaccgcgcagatagtgatgcggaagtaaccgcagatttacttttattgttattagataaactcgaaaatttaccacttccgattattcggcaaatggcaactatttcagggagcctaaaaagttacttaccagagcttttatttgaaatagaaatgaaaaaagaacgagaaaataaaccacttgatccagcttttaccgaacaccgtggtctagtaattcgaaaaaaagaggtcaaaaaaccaacctatagtcgagcagatttgcttgaatttcctgagactgatgaagcgaaaatggcactatttaaaaaagcaggagccccactttatgcaagaagtggtcagtttgaaatgatgaatctagttttccaagctatgaaatcaggaaaacatgctctaattgaggcaggaacaggtattgggaagtcattgggctattttttaccagctatttatcaagctaaacaagctgaattacctgttgtaataagtacatatacgaatctacttcaagcccaattatttgaaaaagacgtaccacttttaacgaaactaactggttttgaagtaaaagcgagtttacttaaaggtcgggatcactatttgaacttatttaaattcgaacaattgcttcaagaagtcgacccgcaatacgatgtcgttgtaaccaaactaaaactactcgtttggctaactgaaaccacaaccggtgatattgatgaagtcaatttatcgagtggtggtgagctattttggaaccgcatgaagcatactggttggtttttatctgaaaaacatgatccgtggttggcacatgatttttataaattcaacatcgaacaggcgagaaatgctgatttagttattgtgaatcacgcgcttcttttgagcgatcatttttctggaagacagacattgccgaagtatgcatttctggtcattgatgaggcccaccattttgctgatagcgctagaacacaaggtagttttattctttcctatcgcaaacttaaatattatttaaaccagcttggttcccttgaaaaatattcattactcacaaggctagcaatggcttttccagaggcggatagtttatatgacttagatattgctgcgatgaagttaggcgaggcagtagaagaattttttaccctcctaaaaatgcaactgaattacgcacgtaaaaacttacaagaagttgttttagttgaaaatagtgaaaaagacgcttggaatgacgcgatatattatgctgctgaaaaagtacttcgcttacttcaagaatctgaaaaaaatatggaaactttactcgcgcaaggtaaacgagaagaaaatgaactaggtgaagccgagagcgcttttttagaagaaatgtatgcctttttacttgattggaaaaatattgttaaacaactagagcaaatgcttcataaaaaatcacctattctaactatctatttgcaagcagataaaaatcattctatctctagtattcgtctgaaagcggtacttatggaagtcgaaccaacgcttggcaaagaattttttgctaaaaaagaaagtgtcattatgacttcagcaacccttactgtaaatggaaaatttgactatttgcgaaaaagtcttggcttagaaaaggaacagctagttgaaaaacgtattccatcgccatttgattataaagaaaatgcgcgtgtgatgatacctgatgatatgccgccaattaaagatacacccattgaacgttatacggcggaactagctaaatatattcgtcatatagctgtgaaaacaaacgggcggatgttagttctttttacagcctcagaaatgttgcaaaaaacgtattatcatatgaaaaatgaaaaatcattagaagaatatgtggttctcgcgcaaggcgtttcagcgggaagcgccgcacgtttaaccaaacagttccaaatgtttgataaagcaattttacttgggacaacgagtttttgggaagggattgacattccaggagaagatttatcatgtcttgtgattgttaggcttccgtttgcgccgatggatgatccctacacgaaagcgcaaattgctcttcgaaaagagcgcggtgaaaatgcatttcaaacctattccttaccagaagccgttttgcgttttaaacaagggtttggtaggttaattagacgcgaatcggaccgcggcattgtttttgtgtttgataatcgggtcgatactacaagatttgggaaaacctttttggagtctattcctagtgcaccaattttaaaaggaaatcaagctgatttactggaagaagttagtgaattctttaaggaaggttaaatttttcctaatatgacttcaaatctatggctgctattgctataatgtatctatgcgaaaatgaaaatgcatatcgccgggcaattttccggtaatttagaaatagaaatgagcgagattattttgcgaaatagaaaacctaaccgtaagattggcaaatggatagcgattattctcggcataattattgtgcttatcgtggcggcttttctgtactttagacaggcagaaaaaccagtaaccaacgcagaaacagaagctttagaccgaataagtggccaagttgatttaaagaccacagataaattttatttatacaatggtccgaaagaagtttattatgtcttaactggcaaaaacagtaaagataagaaaatcattgtctgggttccaaagaaaaaatccgacaaagtatatgttaaattcgcatctgatggtattacagaaagtcaagcacgcgacaaagtagtaaaagaaaagaatccagcaaaaattttgcatgttactttaggcatggaaaaagaaacacctatttgggaagtagcgtatctagacaaaaacgacaagctaaattactttgacattaactttgaaacaggtgaatggtacagagaaattgagaatttgtaattaaactggaggagggaataaaatggacttaccgttgtcaaaacgtgtcaaaggagttgccccgtcgccaacactcgcgattacggcaaaagcaaaacaaatgaaacaagaaggaattgatgttatcggattaggtgctggggaaccagattttaataccccgcaaaatattatcgatgcagctatcgagtccatgaataagggattcacgaaatatactccttcaagcggaatactcgaacttaaacaagcaattgtggataagctcaaaaaagaccagtcattaacctatgaagccaatcagatttttgtaggtacaggggcaaaacatgtattatattctgcgtttcaaacgattttggatcctggcgatgaagtcattattcccgttccatactgggttacttacccagaacaagtaaaattagctggcggagttccggtatttgtcgaaactggctttgatgcagatttcaaaatatcagcaactgattttgaacatgctatcactgaaaaaacaaaagcaattgtgttgaattcgcccaacaatccgtctggcatgtgctatacaaaagacgaattagccgcaattggcgcagttgctgaaaaacatcagatttacattttatctgatgaaatctatgagaaattatactacggaaacaaagcggatttagtttctattgctagcttaagtgaccgtttatatgatttaactatcgtaattaatggtgtatccaaagcttattccatgactggatggcggattggttacgcagctgcaaataaagaaattatcgctggaatgagtaaacttgcagatcatttaacaagtaaccccactgcgaatgctcagtatgcggcgctagaagcttatgttggtagtcaagaagttccagaaaaaatgtacaaagcttttgaagagagaatggaacgcttttatccagaactaagtagtattccaggatttaaaccaaaaaaaccagatggcgctttttatttctttattgaagtaaaagaagcggcacataaaaaaggttttcaggatgtagatgcctttgtagcagctcttttagaagaagcgaaagtcgcagtcattccaggctcaggattcggaatgcccgattatatacgcctttcttatgcaacaaatccagacttattccaagaagctataaatcgaatcaaaagttttatgaaatagggagtgtagacaagtgaaaattacaatcaatcaagcatccgaatttgtcggaaaagaagtaactattggagcatggcttgcgaataagcgttcaagtgggaaaattgctttcttacaattacgtgatggaacaggatttatgcaaggcgttgtcgtaaaagcagaagttggcgacgatatgtttgccactgccaaagctttaacacaagaaacaagcttatttgtaacaggtacaattaatgaagatacacgttccccatttggttatgaaatggctgtatctggcgtagaagtaattagcgaatcgcatgactatccaattacaccgaaagaacacggtacggaatttttaatggatcaccgtcatttatggttacgttctaatcgtcaacacgctatcatgaaaatccgtaatgaaattatccgcgctagttatgaatttttcaataaagaaggattcctaaaaattgatccacctatcttaactggtagtgcaccagaaggaacaaccgaactattccatacgaaatattttgatgaagatgcctttctttctcaaagtggacaattatatatggaagcagcagcaatggctttcggaaaagtattctcattcggcccgactttccgtgctgaaaaatcaaaaacacgtcgtcatttaattgaattctggatgattgaaccagaaatggctttttacaaattagaagatagcttacaagttcaagaaaactatgtggctttccttgtaaaagcagtacttgataactgtcgcttggaactggatcgccttggacgtgatgtgagtcatttagaaaaaatggttgcaccgttcccgcgtattacttatacagaagcaattgaacgtttacacgaattaggctttgatgacattgtttggggagatgatttcggggcaccgcatgaaacagcgattgcggatagcttcgaaaaaccagtgtttattacacattatccaaaagcaattaaaccattttatatgccagaagatccagaaaacgatcaagttgttttatgtgccgatatgattgctccagaaggatacggagaaattattggcggatctgaacgtattcatgatttagaaacactacaagctagaatggaagatttcgatttagaccaagaagcatatagctggtatcttgatttagctcgttacggttctgtaccacactctggttttggacttggtttagagcgtacggtagcttggatttccggaacagaacatgttcgcgaaacaattccattcccacgcttacttaaccgtttatatccttaagaaaaagtgaagccatctattggcttcacttttttatttctaccgagtaaaaaacagcttttccaactgatttagtgattttctcattacttttatatttttcccttgaaaaccatgttataattttggagtgaggtgtttaaaatggatcataaaatgcttgagaaatggatggctgaagggcaagtaactttgccacaagtattagtgaaaaactatgcagcaattggcctaaatgaaaatgaattagtacttttacttcaaatacaatcatttgcagcagaagcagaattttttccttcgatggagatgttaacagatagaacaacacttcgactggaagatactattaaaacaatggattcactgcttaaaaaaagcgtggttgctattgaacaaagtaaagataattcattaatgatttctgaacaatataatttagaaccgctttggggcaaattagtcgcattttacgaaaatatcgaagcggataatagacaagatctggaagtggagcaacaaacgaatttgtacagtttatttgaagcggaatttggcagaccgctttcgccaatggaggcagaaatgttatctgcatgggttgatcaagatagaacaagtcctgatttaatcaaggaggcccttaaagaagctgttatttcacaaaaactaaatttccgctatattgataggatattacttaattggtcgaaacaaggcgttaagacaatagacgatgccaaacgagtagcagaagaatttcatcaaaacggccgaactagccaaacgattaatcaaagcgaagtcaaaaaaagcgcagggtcgattccattatacgactggctcgaaaaaagaaaagggtgacataaacaaattgttatcaaataaacaaaccgtattatgcatagaagaaatggcgaaaatgtttccagcagcacattgcgaactaatccataaaaatacgtttgagttactggttgcagttgtattatccgcccagtgtacagatgttttagtcaatcgagtgacagcttcactttttgaaaaatatcaccgaccagaagattatttagctgtaccattagaagaattaatggatgatattcgttcgataggtttataccgaaataaagcaaaaaatattcaaggcttatctgcaaaaattctcgctgaatttaacggagaagttcctcggacacatgcggaactagaaagcttaccaggtgtcggtagaaaaacagccaatgttgttttatcagttggctttggcatcccagcaatcgcagttgatacgcatgtagagcgaattagtaaacgccttggtatttgtagatggaaagattctgttgtagaagtagaagaaacacttaaacgaaaacttccaaaagaactatggtcggatgcgcaccattacatgatttttttcggaagataccattgtaaagcaagaaacccagaatgtccgacatgccctttactttatttatgtagagaaggaaaaaaacaagcgaaagtgaggggatttgatggctgaatttaaatatgcagtagaattaacccatccagactttccagcgccagatgtaattgcagaagaatatgatcctgaatcaatttacgttagtggcttaccattttggcaagaacaacaatttttcacaaaaggagaaggagtcattccttggaaaaatgaaacggatcgagcttgccgtaaattagcaaaacatatgactaatttagcagaaagtatggaagctgatttaaaagtacatcaaaaaccatctccggttattgtaagagatgcgcttggtatttttctatctattctgttttggagtaatcatcggccagttcaattagataatttaacagagcaaattaaaacgcttgagacgaagccacttaatttggaggaacgactagaatacgtgttaaaacgcggtaatactttcttaggatttcgtcagttaaatgaattagtattagaacagcggaaattaattgctaaaagagaataaaaagcgaggaagagattactcttcctcgctttttgttattcaattaactatctggaattctaactgtagtggaggcggcaggacttcgcttgccatcttttacggcgacgacatttattgatacggtatcgccagggttaccaccacttacagatacagaagtagaagagacggttgtggttgaaccattgacatttacttcataggttgcgccatttaccggagaccaagaaacattaacctgtttagaattagcatcataacttgctcttaggccggcaggggcagtaagatttttggcttcttcttcagcctttttcttagcctcttcctctgcttttttcttagcttcttcttctttctttttctcttcttctgtttttttcttatcttcttcggcttttttcttcgcttcttcttcggcttttttcttctcatcttctggtgtcgaagcggttttagttggtgccgtacctgacaagaataattcgtagcttactttatcgcttgccgtaccttctgcggcacgagcgattgggttgctaccttttaaaattggaacggatacaacgttacttggcattttgaaatctgttgttgttttattggcagatacatgagccataagtttactaaacatgcgttgtgcaatcttttgttcactcgctgacacatattttttcttatcgtcatagcctgtccagacggcgatagaataattggttgtatagccagcaaaccatgaatcacgggcagcaccactagggtagtagtacttcgaagtgaattcaggtggaatatttgttgtacctgttttaccagcggcaggaactcctggtacagctgctgtcgtacctgttccgacagaaagtacatcttttagaacatcagaaaccatataagcagtagattctttcattgctactgtgctacttggttctgtatcgatttcagtttgtccgtcagataagacgatttttgttactgtatgaggtttattgtaaattcctttattaccaaaggcagcataagctccggccatttgcattggattagaactgtttgcaccgatagcattggattctacattttgtcctttatcataggtgataccaagtttattaacaaactgctcggatttatcaagtccaactgcttgtaatgttttaagtgctggaatgtttcttgaatcataaagcgcttgtcgtacggaaattggtcctttatacccgaagtcccagttattaataggggttccgccagtatacgtataaggttcatcttctaaaatatgagcagttgaccaatctaaatattcaaaagctggaccataatcggcaataggtttcatcgtggaacctaccgaccgttttacttgagtggcatagttatatccgcgagttactttttggttacgtccgccaccaattgcttggacacgaccggttttagtatcttgaagaacaattccggcttgcatttcatcatccgtgaaattaacaactttgtttgtatttagcattttctctgtatattcttgtgcgtcacgatcaagtgctgtataaatcgttaatccgtcacggtagacatcatattctttaggaatttcactcaatacttgtgttacgtaagaatcgtatttataaattttgtcttcacgatcttttttcgagcgaagtccagttgtaattggtgatttttgtgcggtagtcatttcttctttagaaattttgtcatgcgtgtacatgttggttaaaacttgatcacgacgttttttagctgcttctgggtgatcgtatggattgtaattgttaggactttgaggcatcccagcaagaagtgcagtttcggctaatgtaagatcttttacatttttaccaaagtaatgttcggcagctgtttgcataccgtgcacgcggtcagacatatagactttattgacataaatttcaagaatgtcgtttttgctatatttttcttctaattgaagtgctaaccatgcttcttgtgcttttcgtgcaagtgtcttattcgtataatctaaataagacattttaatgatttgttgggataaagtactagcaccttctgcaccaaagccgtcagtaacgttggctacaacagccccgccaagacggatagggtcaatcccatcatgttcgtaaaaacgcgcatcttctgttgttagaatggcgtttttaagtgtttcaggtatatctttgtattcaatatattcccgccgttcggttccaacttctgcgaaaaccttgccatccttatcaagtaacttggatgaaagtggatcacgcagtttggagtcggtcagtttaggtgcatcttttgcataatcataaaaaatagttgcaccagccgcaataccaaagaaagttaaaaataaccctacaaagaaaatcgttttgaaaatattaactactacacgttttcctcgttttggttgggcttttttagagctaccctttggttttttgcgatactgagatcttgtctgcggtttatctgccattaaaaatctctctcctttaaaaaaggtttgactagaagtataatttgtctatggattgcaagaagtcaagccttggatttagaccataaggaacttggtctgatacatcttgtatttcacttatagtgactgattttcttccaccactttgcatgcgttcccaaaacggataaaacttttcgaaaggaatgaaatgcgtttctccaagtttttggaaagcgataatgacaaaaacaatgccatcttgttttaagacatttgccatatgtgtcatttggtgatcatgaaaattactgagtggaaaggaagttgtattttgcgtttcttttgcttcaaaatcaacatattttcctttataaacaccattgtagtctgttgtggatggtgttttgaagtaggcttccttaattttggcactacttctttttggatagtccacactgacaatttggacaggggtaggttttttatggatgactgcgatgtcgtgggctaaataatacgcaattgtatcattcaagtcatcttctaaagacatacctcgcttaccataagttacaggagttttccgtttttttgaaggaagtccttcatgactcgctgtatacttcttgccgccgggataaccaatagccatttttttcacctctatcagaaaatttctattctgaatttcagactatcatctattataacaaataaaaatgaaaatgatagtatcaattaaatgcaaaatagctctttctggcatgaaactatcttataaatagaacgtaccttcgtctattttaccatattttagctaataatcgaattttaggcaagattttgctacctatgctattcttgatgtaactgaaaatgtgaagaaaagagtgatacaatggaacttttaatccgtacggaacaattacttcttcagaatgaaaaaaactgggaactatatttaagtaatcgagaagaagaaaagccgtttgatttttataaagacatgaaaccttttgttgatgaggctaaaagatgtgccgatgattttttagaacttgccattccgtgggttaatactgagcggcctccttatttgggggaactacaacttcgccaagcttgtgataatgttcagatgaccgcagtaagtgcttttaatggaagatctttttataaacattttttagatcattatcaatctactaagtatacattaacaagagtgagagatttcttaaaaagaaaagaggaatccatgtgaaatccatcgcagtgaccggatataaaaattttgaacttggaatttttaaaaaggatgcggatgaagctgtttatattaaagaaacaataaaacgccatttaattcctctaatagaagatgggcttgaatgggttattatctctgggcaattagggattgaactttgggccggagaggtagtcgctttgttaaaagaggaatatcctattaaattagcagtactggaaccttttgaaaaacaaagtgcgaactggaacgaaaataatcagttatgggcccaggaagtaataggggctgcggattatcacgcttttattacaaaacgtccttatgaaagccccgcacaatttgcagctagagatggatttattattgataatacagatggggcattgcttgtttatgatttagaaaaagaaggctcacctaaatttttttatgaccgtgctaaattagcaaaagaacaagctaattacttcttagaatgcattgatttttacgcattacaagatgttgtcgaggatatgaatcaaacattttaatatagaagaaaacggttattttataaaaaacactcgaatagattgacaaatggtgtgagatttggaaaaataagggtaagtatataattagaacaaaaaatacgtaagaatagagatagaggtggagttacatgacttcggaacaatttgagtatcacttaactggcaaagaaatattggaaaaagaatttaaaactggacttcgtggttataatccagaagatgttgatgagtttttagacatggttattaaagattacagtacatttacacaggaaattgaagcacttcaagcggaaaatattcgtctagtgcaagaactggataatgcaccagtgagaacaacaacacaaccagcaccgactttccaagcagctgcacaacctgctggaacgaccaactttgatattctaaaacgtctttctaatttagaaaaacacgtttttggaaataagctggacgataacgaataggtatgctagtataagtaagttaagaataaatgaataacgttcggataatcgctgttttcttatggaagcagaggaaagtccatgctcgcacggtgctgtgatgcccgtagtgatcgtgcctggtcaaacaataagccagggcattccggatttccggtttgacggcaggtgaatgacctaagtcttcggatatggtcttataaccttgaaggtgccacagtgacgaagttccggcagaaatgctcggaagtggaacgaggtaaaccccacgagcgagaaactcaaacttatggtaggggcacttttcccgaggaatcaagaacaagggacgaggcgcaaatgtatttttgtgcagatagatggttatctctttactattaccctgtatgtagtaaagaacagaacatggcttacagagcgttatttacaggatttaatttaacattgaaggctgttttagaaggccggagcgcaagttttaaggtgggtgttcgacctggttgaatgcctatttaaaacaaaactcctcctcttaaaacagcttttttcattagaaatttaattaaaggatgggacacaatgaaatcatttcagttggtggcaactgcggcttctggtttagaagcgattgttgggaaagaagtagcgcgtttaggctatgatccaaaagttgaaaacggtaaagtatattttgaaggagatttatccgcaattgctcgagcgaatctttggcttcgtgtagctgaccgggtgaaaattgtggttggcgtttttaaagcaacaacatttgatgaactttttgaaaaaacaaaagctctaccatgggaagattatttgccgctagatgcacaatttcctgtcgctggaaaatcagttaaatcaacgctttatagtgttcctgactgccaagcgattgtgaaaaaagcaattgtaaaccgcgtcagtgaaaaatatcgtcgctctggtcgtttgatggaaactggcgctttatttaagctagaagtttccattttaaaagatgaagtaacgttaacgattgatacaagtggtgccggattacataaacgcggttatcgtttagcacaaggtagtgcgccaatcaaagaaacaatggcggcggcactagtgttactaactagctggcatccggatagacctttttatgatcctgtttgtggttctggaacgattccaattgaggcggcgctgattggacaaaatattgcgcctggttttaaccgcgagttcgtgtcggaaacatgggattggatgccgaaacaaatctgggaagatgcgcgtcaagaagccgaagatttggctaattatgaccagccgttaaacatcattggtggcgatattgatgctcgtttaatcgaaattgcgaaacaaaatgcggttgaagctggccttggtgatttaattacttttagacaacttcaagtggctgatttccaaacagaagatgagtacggagttgttgttgcgaatccgccatacggggaacgggtagaagacgaggaagcagtgcgccaactgtaccgcgaaatgggtattgtttataaacgcatgccaacatggtcagtgtatgtccttacctcttatgaactttttgaagaagtttatggcaaaaaagcgacgaaaaaacggaaattatataatggttacttgcgcacagatttatatcaatactggggtccaagaaaaccacgtcctaaaaaagaagactgaatggaggagttaagtttggtagaaacattagaagaggaatttttagcgtatattaaaaaaatggaagctttagaagaagcactcgcattagtttattgggatcttcgtacaggcgcgccggcaaaagggatggaaggccgttctgatgttattggcgttctatctgaagagattttcaatatgcaaacatcagaagaaatggctgcttttattgctggacttaaccttgataaagaaaatctatccgaaatcactcgtaaaactttagaagaatctcaaaaaacatatgatttaaataaaaaaatcccaagtaaagaatacgcggaatatactaaactagtagctcaagcagaaaccgcttggacaacagctcgcgaacaaaacgattttgcggcttttgaaccgttcctaacaaaaatccttgaaatgaagcgtaagtttgttgagtattggggttatgaagaaaataaatatgacacacttctcgaccaatatgagccaggcgtaacagtatcagtgcttgattccgtatttgaaaaagtacgcgacggaattatggcgattcgcgaaaaaatcgcaaacgaaggcgtgaagccagatggaaccattttaaacaccaaaatatcagaagctaagcaaaaagaatttagcattcgcattctgaataaaatgggctttgacttcgaagcaggtcgtttagatgaaaccgtgcatccttttgcgactggtttaaatactggcgatgttcgtattacgactcgttacaatgaaaatgattttaaaatggctgtttttggtacgattcatgaaggcggtcatgcgatatatgaacaaaattttgatgcagcacttgtaggtaccccacttgcaaacggggcatcaatgggcattcatgaatcacaatcattattttatgaaattattatcggttctagtttagcattttggaaaagtaattatgctgattttcaagcgataacaaaaccggcttttgatcatgtgaaattggaagatttctatcgtgcagtgaacatctctgaaagttcgcttattcgaattgaagctgatacattaacttatccacttcatattatgattcgttatgagcttgaaaaagcacttattaacggggagctagaagtgaaagatttaccaaaagcttggggcgacaaatacgaggaatacttaggcattcgtccagataatgatacaaatggcgtattgcaagatattcactgggctggtggcgactttggttacttcccttcttacgcactaggtttaatgtacgcagcgcagttctatcatcaaatgcaaaaagaaattcctaatattgatgcaatcattgccagcgatgattatacagaattaaaaacttggttaaccaagcatgtgcatacatttgggaaaacgaaaaaaccgctagaaattttaacagatacaacaggagagggattaaacccaacttatttattagatttactagaaaaaagatacgcttatgtttaccaattcaataagtaaaaaattagcttgaccctgctcctttagaaagctataataaacaacataacttaaaaccgaaatacttatataatagttgcgattgggcgacgagtttctacctggttaccgtaaataaccggactatgagtagtttgtataaagaagtcactccgaaaattggtggcttctatactgcttctctaaatttagagaagcagtttttttattttgaaaggagaatatctttgaaattactggaagagtttattcaagaaaaaggtacagttttaccagggaatgttttaaaagtagatgcatttttaaatcatcaaattgatcctggtttaatgcaagaaatgggaaaggcgtttgctgaacgttttaaagatttagggattacaaaaatcgtaacaatcgaatcttctggtattgcgcctgcagtttttgccggactagcactttcggtaccggttgtttttgctagaaagaaaaaatcggtgacgttaacggataatttgtatacaagcacggtttattcgtatacgaaaaaaaaatcaaatgatatttctgtttccaagcaatttttaacggatgcagatacgattttagttattgatgattttctcgcaaatggtcaagcggctcttggcttacttgaaattgctgagcttgccggagcaaaagtggcagggattgggattgtaattgaaaaatccttccagcaaggtcgcgaattattaaataaaacagggattccagtttattcactagcacgaattgcctcacttgaaaacgaagaaatcttatttttagaggaggaataggagtagatgttaggtaaagggaagattgcagctttaggatttcagcatgttctagcgatgtatgctggagcggttattgttccactattaatcggtggagcgcttggttttaacggagaagaaatgacttacttagtttcgattgatatttttatgtgcgggattgcgacattgctacaattaacggttaatcggttctttggaattggtttacctgttgtacttggatgtgcggttcaagccattgcaccaattattttgattgggcaagatatggggatcggcgcgatttacggctcgattattgtttcaggactttttgtattattaatagccccattcttctctaaagttgttcgatttttccctcctgttgtgacgggttccgttgtaacagttattggtttaacacttattcccgttgccattaacaatcttgccggcggggcgggggcaaaagattttggttcgatgtataatcttggtctaggttttgggacattattattaattattttagtgtatcgttttggccaaggtttttcgaaagctattgctgttttaatcggtcttgttggaggttcactttttgcggcgctttataaaggtatctcgcttggaccggttagtgaagcaagctggtttcatatgccaaaaccattttattttggcactccgacctttgaatggccggcgattattacgatgattttaattgccttagtaagtatggtggaatcaacgggtgtctattttgctttatcagatattaccgaacgaaaattaacgcaaaaagatttaactcgtggttaccgtgcggaagggctagcgattatgcttggcggagtttttaatacattcccttacactgcttattcgcaaaatgtcggacttgttcaactttctggcattaaaacgcgtaaagttatttatgcggcagctggtttcttaatcgtcctaggtttaattccaaaaattggagctgtgacaacaattatccctactccggttcttggtggggcaatggttgctatgttcggaatggttgttgcgcaaggtattaagatgttaggaaaagttaattttacttctcaagaaaacttattaattattgcttgtgcagttggtgttggcttaggagtaacagttgtgccagatttatttaatgctttcccttcctttgttcgtttatttacgagtaatggaattgttgctggaagtgttaccgcaattactttaaatattattttcaacatgattcctcatcgtaaagataaaaaactagcagatccagaacctcaacatgctgagtaaaaaataaaacagttttaattgggctattttttctcatatacttataagcaataatttatttgaaagcggaattggtctatatcaatttcgcttttttgctgtttttctagttttattttcattatgatgggtattttctagtagctccaaaaaagcaagtttggggtagataaagtaagggggaaaagtagatgaatggaaaacaagtaatggttggtggtttgtctttacttttagttggtacggaactgggagcatttggcagtacagcgcaagcggcgacggatgacgcttctgttatgccagatatttctaacaaacaggtgctagttgggtactggcatagttggaaatcttccggaaaagatggctatcaacaagggacttccgctgatatagcactgaaggatacaccgaaagcttataacgtggtagatgtttcctttatgaagggagacggagtaaatcgcatcccaacatttaaacctgttggaataaatgatagcgatttcagagcacaagtcggcgcattaaacaaagaaggtcgagcagtacttttagcgcttggtggtgcggatggtcacgtggaactgaaggctggggatgagcaggcgttcgcgaatgaaattattcgccaagtagaaacatacggctttgatggactagacatagacttagaacaaagcgccattaccgcgggagataataaaactgttattccagcagcgcttaaaatcgtcaaagatcactataaagcacaaggcaaaaacttcttaattacgatggcgccagaatttccttatttaaaaccaggtagcgcttatgagagctacttaacttcacttgctaattactatgactatattgccccacaactttacaatcaaggtggcgacggtgtttgggtagatgaaactaaccaatggattgcgcaaaataatgatactttaaaagaatctttcttatattacatggcagattccttcattaacgggacgcgcggttatttaaaaattcctgcgaataaatttgtcttcggtttaccagccaatgtagatgcagcagcaactggttacgttaaagaccctcaaattgtccaaaatgtattcaatcgtttacaagcaaaaggaactccagtaaaaggtgttatgacctggtccgttaactgggacgctggtaaaaatagtgccggagtagcttataataatggtttctctaatgcttatggaccaatcgttggtactaaataaataacgaaccgatacccattttaagtgggtatcggtttttttaaaacaagagacttgcattcattttgaaatcggcgtatgatataaatcggaatgattattatttatgaaaggagagacatatggctaaaaaatcaaaagttgctaaacatgagcatcaacaagcgcttgttgaacaatatgcagaacttcgccgcacgcttaaagcagaaggtcgttttgatgagttacgcaagttaccaagagattcttcacccacacgactacacaatcgttgtgaattaacaggtcgcccgcatggttatatgcgtaaatttggtatgtcacggattcggtttcgtgaactagcacatcaaggtcaattacccggcgtgaaaaaagcaagctggtaaaaagctcctttttttctgcgagccagatataattatgctacaatagatggcagtagaaggaaataggaggattatatatgaacgaaaatcgagaaaatttgctcgttgtagatggaatggcactacttttccgagcattttatgcaacagctgtttccaaacaatttatgtttaatcaacacggaattccaacgaatggcgtgcaaggctttatgcgccacatgtttgcagctattcgtcaaagtaatccaacacatacacttatttgctgggatatggggtcacaaacattccgtaatgaattatatgatggttacaaagcgggcagaacggcgccaccagaagaaatgatacctcaattcgatttagcaaaagaagtagctgctgggtttggctttgttaacttgggcgtacctggctttgaagcagatgactgcattggtacgattacagttcaggctagtagtagtatttcgacaaccgttttaagtggcgataaagatttactacagctaatcgcaccgacgaatgatgtatggattatgcaaaaaggttatggcaattataaacgatataatgaagcaacattttttgaagaaatgggcattacgccgaaacagtttattgatgtaaaagcattgatgggggatacttcagatggttatcctggagtgcgtggcatcggtgaaaaaacagcaattaagctcatccaagaattcgaatcaattgaaggggttttaaataatttagacaagcttaaaccagcccaacaattgaaaattcaagaagatttagcaatgcttgaactgagccaaaaactagctaaaattcatactgaagtgccgctagaaatgaacttagcaagcttgaaatataacggtttccgcgatgacgcttttgcggtcgttgaaaaatatggcttaaaaaccctaacgcgggatattgaataaaaatagaagcaatctggttatttgataccaggttgcttctgtttttttatagcctgacgcgcgagttggtcggcttgtttattttggctaacgttacgccattctgcaaaaaataactctactgaatcagccatttctaaaattgcttctaaatggggtttgaataaaggatttttagcgtgtcgtttatggattgcttcaatggcgactttcgaatcagaatacaaacgaatgaaagtggcttgtttttttaaagcttcttctagacctaatttaatcgcgataaattcggcttcatgattggtcataacttcgagagggatggcgaattgttcatagattcctgctgcttttagaactatgccagcaccactaggaccaggatttccagcacttgcaccgtcaacgaaaacttccatattgtgcgcctcctattgtttgagtagatgtggctttattatagaaggaaagctatttttttgcaataaaaaaaccggtcaaaggataccggttttaagtccgtgtctaattggcaactggattaggctttttccacattggctgcttgagcgccgcggttaccttcaactacttcaaatgttaccgcttggccttcttctaaagatttgtagccgtcaccttggatcgctgtgaagtgaacgaaaatatcttcgccgccgtctgattcgataaaaccgtaacctttttcattgttaaaccattttactttcccattttgcattgaaataaatcctcctaagtatggctaataattgctagaatcatttttcaaacgctttcatttctgtttaaaaattttttctcgcaaatactaccttttcagttcatagcgttgccgcatatgatactaacactataaatcaaaatacctataaacgtcaaggtgattttcgatatttttttaatttttggacttgtaaaggcttactttttacttttatgttatattttgtcgttaaatgctagatttacctcgaaaaactacgtgaatgtcctaggagaaatttcgttttagaaagggtaattgcttttagaaagtccgatattatagtacaattggctatgtgaaagaatataagttggagggtatagctatgccaacacctagtatggaagattatattgaaaaaatctattcccttattgaaacaaaaggttatgccagggtttcggatattgctgatgagttatttgtccatccgtcttctgtaacaaaaatggtacagaaactagataaagacgaatatttaatctatgaaaaatatcgtggattaattttgacgcctaaaggaacacaaatggggaaaaggctactagaaagacatgcattactagaaagttttttaagtataattggtgtagatccgtcccatatttatcatgatgtggaaggtattgaacatcatttgagttggaattctattgaccgaatcggggatgttgttcagttttttgaaaatcatccagatgcgcttaagacactcaaggaaatggatccaacgaaaccagatacaaaggaataacggtaatccaaggttgagatgttgatttttgcgcaatcaggctttactttagaaatcaaaaatggtgttacatcgcttggtgtcacgcttttttgatgcactgaagaagccaaaatatcttaattctttgttacaatatacatattcggaggggatatcatgtcaaataaagtgaaatcagatattgaaattgcatcagtagcagaaattctaccagttacgactatcgcggaacatttaggactagatgcagatgcactcgaactttacggaaagtataaagcaaagttatcctatgatacgattcactcgttaaaagacaaggagcaaggtaaacttgttcttgtgacagctattaatccaacgccagccggtgaaggtaaatcgactgtaacagttggtcttggcgacgcactctctaaaaaagataagaaaacagtcatcgctttgcgggaaccatcacttggacctacaatgggtattaagggcggggcaactggtggcggttatgcgcaagttattccaatggaagatattaatttacattttacaggcgattttcatgccattacagcagcaaacaacgctttatctgcgtttatcgataatcatatgcaacaaggtaatgatttaggaattgacgggagacgaatcgtttggaaacgtgttgttgatttaaatgaccgagcgcttcgaaaagtggtcgttggtcttggtggtcctattcaaggcgttcctcgtgaagatggttttgatattacagttgcttctgaaattatggcaatcatttgtttagcaagtgacttaaaagacttaaagaaacgcttaagtgaaattgtgattggctataattataaaaaagaaccaataactgttggcgaaatgggttatgaaggtgcattaacattgctattaaaagatgcgttaaaacctaatttagtgcaaacattagaacatactccagcgattgtacatggtggtccttttgctaatattgctcatggttgtaatagtgtttcagcgacaagtactgcgcttaaacttggcgaatatgtagtaacggaagctggttttggagcagatctaggagcggagaaatttttagatattaaagttccagcacttggaaaagcaccagattgtgtcgtgattgtagcgacaattcgcgcactgaaaatgcatggtggcgctttaaaaacagaacttagtgaagaaaatgtcgatgccctagcaaaaggctttactaatttacaaaaacatacggaatcgattcaaacatttggtattccatatgttgttgccattaataagtttattacggattctgatgcggaagtcgcgaaattagaacaactttgcgaagaacatggcattcctttttcgttaacagaagtgtgggaaaaaggcggcgacggtggtctagaacttgcagataaagtaatcgctgcagtcgaaagcggagaagaggactataaacgcatttatgatgatgcttggtcaatagaagaaaaattagaagcaattgtgacgaaggtttacggtggaattggcgtagaactttctagcaaggcacaaaaacaaattgttgagtttaaaaaatacggctgggatcgttatccaatttgtatggcgaaaacgcagtattctttatcggacgacccaacattactcggtcgcccaactgattttgtgattcatattcgtgaattcattccaaaacttggcgcgggcttcgttgttgctttaactggcgacgtgatgacaatgccaggcttaccgaaaaaaccagcggcattaaatatggatgtcgatgaaaatggtaacgcacaaggtttattttaaaaataaaagttccaaaagtggattcgccacttttggaacttttttcatctcaagcaattgctatgttctatattttcagctagaatagataaggacgaaacggaaatggatgggactaaatgaaacagttaaaagtagaaaacttaacaaaaacatatggcgaaaaaagcctgtttgagaatatctcgctaacgataacagaaggcgaacgcattggtttaatcggtgtaaatggtactggtaaatcaacgctgttacaaattatttctggaagtgaatctggggataaaggtagcgttacgaaagcgaaagattatacgatcggttatttggcgcaagatcctgtttttaatgaagaggatacggttctttcggcggtttttgacggtgatactgcggcgcttcgagcaatgcgtaagtatgaagaagtcttattagcgatgtcgcttgatgcagaaaataccaagctacatgatgcctatacagcggctagccaagaaatggatgcgagtgctgcttgggatatgaatactgaagcgaaaacaatcttggaacggcttggcattactgacttaacagcaaaaataagtgagctttctggcggtcagcgaaagcgtgttggtttggcgcaagtcttgattgagacgccagatttacttattttagatgaacctaccaaccatttggattttcagtcgattcgttggctagaagagtatttaaatcgctttaaaggagcggtattactcgttacccatgatcgttacttccttgaccgtgtgacgaaccatatggtggaactggaccgtggttcggcgtaccgctatgttggaaattacgaaaaattcatggaatccaaggcaattcgcatggaaaacgaagtccgcgaatcagagaaaaataaaaacctttatcgtaaagaactagcttggatgcgtcgtggtccacaagggcgcgccacaaaacaaaatgctagacaagaccgtttccatgatttagagaaaaaagtcaaaactaaaatcgacgactcagaacttgcgattgattttgtcactagtcgccttgggaaagatgttttcgaattgaaaaatttagaaaaacgctttgacgaaaaacaagtgttacaagattttagtttaattattcaaccgggagaacgtcttggtatcactggtaataacggaactggtaaatcgactttactgaatatgttagctggaaaactaacgcccgatgccggcgaggtaattacgggtcaaacagtacaaatcggttattatacgcaacaaaatgaagaaatggatccagatatgcgaatgattgcttatttgcaagaggcaggagagcaagtaacgacttctggtggagaagtgattagcgttagcgccatgctagaacgatttttattcccaccaaattcccacgggaagaaaattggtagcttgtcaggtggagaaaaacgccgcttgttcttactacgcattttaatggaacgaccaaacgtgttgctactagatgagccgaccaacgacttagatacgcaaacattaactgttctagaggattacttagaatcttttaacggtacggttattacggtcagccatgatagatatttccttgataaagttgtaaataaattgcttgttttccgggcaattggcgaagtagaaattttctatggtgaatatagtgattatttgaaagaacttgaggctaaaggaaagccagcaaaatcaatgaaaaaaatggcgaatacttcggccgaaaagtcatcacctgagaaaaaagagaaagtcaaactaacctaccaagaacaacttgagtgggacgggattgaggatgccattagcgacttagagcaagacattgaatcgctcaatgaaacattggaacaaaccggagcagactttacaaaagcagcagaaattagtgaacttattacagcgaaagaatcagagttggaacaaatgatggaacgctgggaatttttatcacaatacgcggaataaggagtgcgaacgatgaaacaatatttggatttagaaaagtacgttttagagaatggaacacaaaaaggagatcgcactgggactggaacaatcagcacatttggttatcaaatgcgttttgatttacaggaaggctttccaattatgacaacaaaacgggtaccatttaaacttgtagtaagtgaactactatggtttttacatggagatacgaatattcgctaccttttacagcataataataatatttggaatgaatgggcttttgagcgttttgtgaaaagcgctgattataaaggcgaagatatgactgactttgggctgcgtgctgagcgtgatccggcctttaaagaagtgtatcaagctgaaatggagaagtttaaaacgcggatcttagaagacgaaacgttcgcgaataaatacggcgaattaggtaatatttacggcaaacaatggcgtgaatggaaaacttcgcaaggggaaacaattgatcagttagctgacttaattgaaatgattaaaacaaacccgaactcgcgtcgtttaatcgtgtctgcttggaatcctgaagatattccgaatatggctttaccaccttgtcattcattgtttcaattttatgtggcagatgggaaattatcgtgccaattgtaccaacgaagtgcagatattttcttaggagtaccgtttaacattgcaagttatgcacttttgacacatttaattgcacgggaagttggacttgatgttggtgaatttatccatactatgggagatgcacatctttataacaatcatatcgaacaagtgaaagaacaattatcaagaactccgcatgcgttaccaaaattagttctttcagataaacctgcaaccatttttgattttgaagtagcggatatttcactagatggttataatccagatcctgcaattaaagcaccaatttcagtataagggaggttttcttagatgataatttttgtttgggcacaagaccgcgctggtaatatcgggaaagacaacaagatgccgtggcacttaccaggagatttacaatttttcaaaaaaacgacaactggaaaaacgctcgtcatgggacgtaaaacctatgaatcactaggtaaagctttaccaaatagaaagaccattgtgttaactagggacaatgaattacaactagacgatgcagaaattcttcattcacgggatgaagttctggcgcttgctgaaaccggcgaaccgatttatgttgttggtggagcggaaatttatcgtttatttatggatgtggcagataagctaattgtcacaaaaattgacgcggaatttgatgcagataccgcatttccagaagtagactgggaaaacttttcagaagtagcgaaagaacctcatgaaaaagatgagaaaaataaatataattacacattttatacgtatgaaagaaattagtagaaacgttgcctatttgcgggcaacgtttttcgagtggagtgacgtttaattgttatcaaaaatggagattaataagcttgcgatgaaagaaagtatgaccctgcttgcttgtccgatttgtgggggagaattctcatttagcgagccgaattcatttatatgtaaaaaccatcatgggtttgatattgccaagccgggatatttacatttacttaagcaagtacataaaaccaaatacgatcaagccttattcgaatcacgaaaaaaagtgattgcgagtggcttttttgaaaaattaatcgaacgagtgacagaaatcattgctgagacaaaaaaagaagaagtagtgatatatgatgctggttccggtgaaggaagtcatttagcgcgagttgtaaaaaatcttcaagaaaaaggacgccatgtccaagcaattgggctagatattgctaaagaaggcgtgaaacaagctgctcgagattatcccggaattgtttggacagtagctgatttagccaattgtccaacccagacagagacggcagatgtgattttaaacattttatcaccttcgaattatgaggaattcaagcggctgttaaaaacggatggctttttgttaaaagtagttccagaagcgaattatttgcgggagttgcgcgaatttatttatgttgatgagaagagtagttattcaaatgagtccgttacatctcggctagcagaaaaattaacagtcgagtacgttgaacgggtgacatataaagcgccaatcgcaaacgaattatttgccgattttcttgaaatgacgccacttggttggcacattgataaagataaaaaaagtgaattattaataaatccgccaaaagaattaacggtagatctaaaaatcattattgcaaatagagcacatcttttgtaaaagctatgtgaattatgcgcaatttaagctataatgaaggggaaaaatacagatgctggaggaatgacatgaatcaatcagaaacgaaagcgttagaagcactgcaaaacggatcagacatacgtggaatagcaatcgctacggaaaaatatcagattacgctgacagacgaacgtgtagaaaagattgcttatggctttgcgaaatggctaaaagaggagaaaaaagtggaaggtcagggaaaagtggcgattggtcatgacagcagactttcagctgaacgattaaaagcggcacttatcaaagggttgactttctcaggtatcgatgtggtggatgtaggacttgcaactacgccggccatgtttatggcaacccagtacgaagactatgactgcgatgccggaattatgattacagcgagccacttaccttttatgtataatggactaaaattatttacgaaatctggtggagctgaacatgaagatattgattatatcgtagctcacgcaggtaaatctttcatagaaaacggactaatcgccggaaaagttacaaaacaagatttactttctacatatgcggcagacttaacggataaaattagagctggaatcacggatgcagcggacaaaatgaagccactacaaggaagccacattattgtcgatgcagggaatggcgctggcggcttttttgctgaaaaagtgttggcagagctcgggtcagacatatctggtagtcagtttttagatccggatggcaattttcctaaccatattccaaatcccgataatgaagaagctatggctagcttgaaaaaagcggtacttgcgagcggagcggatttaggcgtgatttttgacacggatgtagaccgagctgcgattatggataaaaatggagaaagtttaaaccgtaatccattaattgctgttatttctagtattattttggaagaaaagccaggaacaactatcgtgactgactcaacaacaagcggacatctgcaaacattcatcgaagcaaaaggtgggaaacaacatcgctttaaacgtggttatcgtaacgttatcaatgaagctttacgccttaatgcaaacggaacaccatcagaaattgctattgaagtgagtgggcacgctgcattaaaagaaaattatttcttagatgacggtgcttacttaattgccaaaattttgatgacgtacgccactttacgaaaaaatggccaagatttgcctgatttaatagctgatttaaaagaacctgcagaaagcgaagaaattcgtttaagtattacagcaccagattttaaagcttatggcaaagaagttttagctgattttctggcatttgtagaagctgacgcggacatggaattagaaccagtaaaccaagaaggcattcgtgtgaatacgaagggtgcgcttggtgaaggttggttcttgcttcgaatgagcttgcacgaacctgtaatgccaatgaatttagaaagtgatgaagctggtggcatcaagaaagtgaaagatcgtttagcaggatttttcgcaacaaaagccgatttaaaaatgtaaataacaaagaacttggtatggaaaacgtatcaagttctttttctttttaccaaatcgattgaaaaagtagaacgagtgtagtaaacttaaaaagcaagcacttactttaaaagggaaataaagtacaggagtgtgttttttggaaacttggattacaagtattatggctgattttggctatataggtatttttttgttaattatgattgagaacttgtttccgcctattccctctgagattatcttaacttttggtggatttatgacgacagtttcatcacttaatgtagtgatggtgattattgtagcaacacttggttcagttgtaggagctattttactttacaaagtggcctcttattttggcaaagaacggctaacgcatattgttttgaagtatggccgggttttacgactcaaggaatcggatattgaacgcgctgaaagtttctttttgaaatatggtagctgggcagtgtttttatgtcggatgattccacttatacggagtttgatttccattccagctgggatgacgaagatgaaaatgtcacgatttctaattttaacaacggccgggagcttgctttggaatacggtattaattggtcttggcgctcttcttggcgaatcttggggcgaaattgttgttttcatggatagtttttcgacagtgatttatagtatcattgctgttataaccttgcttggcctaggattctttttccgagcacgctttaaaaaaacactagacgaagaataatgtctaaccttgaggaggaatcttcaaggtttttcttttgcgattttcgctttcgtgctatgataagttggacatagaaaggggacgggacatatgcggattggaatgcggacagtaaaaacagcaattgcagcgacactagcgattattttggcggaatggcttcatttggaatatgcagtttcggcgggaattatcgcgattttaagtgtacaaaatacgaaaaaggggtctctgcaacttgcgattcagcgggtttattcgactgtattggcgctttctattgccgccgtatttttcatgctcattggttataacgcagtgagttttggactttatctactgatttttattccgcttgctgtgagactacatgttgctgacgggattgttgtaagttcagtacttgtatcgcacattttattagaacaatcgctatcattcttttggtttaaaaatgaacttttacttatggcggtcggcgcaggtatcgcaattattttaaatttatacatgccaaaaatggaagacgaattaaaacgcagtcaacaaaaaattgaagccatcatgagacagattttaacagaaatgacgcaagggcttcgaaatcagtctgaatatcttgatgagtttggcttattaaatcaattaaagggtacattagattatgcacaagaaaaagcagcaagaaatttggacaatcaattttttgcttcgtcacactattattctcagtatgtggatatgcgactggttcagtaccgaattttgacacaaatgaagcgacatctggtttcgttccatcattcttcagagcaaagtatggcgctcgctgaaattactgaaaaaacagcgcagacgttggatgaacataatacggcggaagatttagtggcagagattacaacgatggtgcatgaatttcgtagtagtaagctcccagaaacacgtgaagaattcgaaaatagagccattttattccaatttatgaatgatttgcgctatcttttagaaatgaaacgtgatttttatgcggagtttggcttgaaagaaaaagaaatgacgagaggacgatgaaaaatgattgaaaaaattggtcaagtaatgttatatgtggaagatcaagcggcagtaagagatttttgggtggaaaaattggattttgtcgttgtatcagaagaagtcgtaaacggcgaaattcagtgggttgaaatcgcgccttcaaaaggtgtggaaactacttttgtgctccaaaataaaaagaaagttgccgaaatgaacccggatatgaaccttgggacgccatcgattttactatttggaacaaatattagcgaactgtatgaagaatataaaaacaaaggaattacagtaggggatttggttgatctgccaatcggtcgcgtgttcaactttgcagataatgaagggaattatgtggcgatttgcgaaaaataaaaaagtccagatgacaatctaagtgattgccatctggactttttttatatagtagatactagcttgttttcgctcagtgctgcttgggctgctgctaaccgagctattggcacgcggtaaggcgagcatgatacataactgaggccaagttgatggaagaagtggattgattctgggtctcctccatgctctccacagacgcccatttttaagttcgcatgagtcattcttccgcgagtaacagccatttcaactaacgcaccaacgcccgttttatcaatcgtaacaaatggatctttaggtaaaatatctttttcataataatcagctagaaatttagttgcatcatcacgagaaaaaccatatgttagctgagttaaatcatttgttccaaaactaaagaactgggcttcttcggcaatttcatctgcggtcacacaagcacgaggaatttcaatcatcgtaccaatatcaaaaggtagcacaactcgttctttttcaaaaatcgcatgaatggcctgcttaatttcatttttaatataactaagttcgctttttgtagcgattagaggaatcataatttctgggtggacatcgattccttcatcatgaacgataacggcactttccatgattgcttccgcctgcatacgataaatttctggaaaagtaatggctaaacggcaaccgcgatgacctagcataggatttgcttctgccagctcctcaattcgtttggtgatttggggaacagtacggttcatatcgcgcgctaattgttcgatttcgcggttagtcttcggtagaaattcatgtaagggcggatcaagaaggcgaatattcactgctcgaccatttgctattcgaaataattcactgaaatctgttttttgcatctcttttaatgatgttaaaacagattcgcgctctttaagtgattctgctaaaatcatttgtctaacataaggaatccttttttcatcaaaaaacatatgctctgtgcgacaaagaccaacaccttcagcgccaaatagtaatgcttttttaaaatctgttggtgtatcggcatttacgcggatttttagttttttctcagcgtctgcccatgccattaattcatcaaaatgaccgcctatagaagcttctgtgagtgctatttgtccaagatagacatttccagtgctgccgtcgagagaaagaaaatcaccttcatgaagctgttctccggttgtaaggataatggttttttctttttcattaatagtgagttcagcgcaaccagctatacagcattttcccattccgcgggccactacggcagcgtgagaagtcataccaccatgagcagttaaaatcgcgctacttctcgccataccttcaatatcttcaggagaagtctcatttcgtactaggataacagaaatgccgcgttctgaagctgctacggcttctttagcttcaaagaaaatttgaccggtggcagctcctggacttgctggtaatccggttgcgatgacttgtccagcttttagagcgctttcatgaaaagcagggtgaagtaattgatgtagctgtttcgtttctactcgcataattgcttcttcacgagtgattttgccttcgtggacgaaatcgactgctgtttgaattgctgctttggctgttcgtttcccgctccttgtttgaagaacgtaaagttttcctttttcaattgtaaattcaatatcttgcatatctaaatagtgattttcaagtagttcacatgttttaaggagttcgttataaacgaggggcattctttgttctaatgcgctaatcggttcaggcgtgcggattcctgcaacaacatcttcaccttgtgcatttagtagaaactcaccaaaaacttgcttttcaccagtggatggatttcgcgtaaaagtaataccagtaccgcttgtttcgccagtgttgccaaaaaccatcgcttgaatattcacggctgtgccaaaacttgcatcaatatcatgcagtctgcgataaataacggcacgagggttcatccacgaatcaaaaacagcaataatcgcaagtctcagctgttctaacggatcttgcggaaaatctctgccagttgcttggctgaaaatcagtttataaatctcaattagttcacttaaattagcagcagttaattccgtatctaaaagataattattgtctttttttatacgagcaagcgcctgttcaaattgatagcttggaatttcaaaaacgacatcgccaaacatttgaatgaagcgacgataagagtcaaacgcagaacgagcatcacctgttaagttagctaatccttcagcagcttgatcatttaaccctagatttagaaccgtatccatcattcctggcatcgaaaaaggcgcgccagaacgtactgaaactaacagtgggttttccgcgaatccgaaaatttttccagtttgtttttcgagttctgtcaaatgaatttttacttcttcaaaaatgtcttcggatagatgtttgttgctcgttgtataatcattacaagcatcggtcgagataataaagccaggagggacgggcaaaccaatcttcgtcatttcggccaaattagcaccttttcctcctaaaagatttttcatttctttagaaccttcactgaactgatagacaaattttctcactttattcacctcttctaattagtggtaactcgtgataatctccgtgattagggcagcggtttcttcaatggctttgtcttcaacatggattacttggcagccaagctttttgaaagtagcataaccatattctaattcttctaaaatgcgtttttcactagaataactacttgcttcatctaagccaattgattttaatctcactttccggatttgagcaagtttttcaggtgtagttgtcagaccgataatacgttctgctgggatttgaaaaagttcatctggaatcggaatttcgggaacgagtggcacgttagcgactttccagttttgattagcaagatagctactaagtggggttttactcgttcttgaaacaccaactaaaacaatatcggcatccagtaaaccgcggggatctttgcagtcatcatatttaacggcaaattcaattgcggcaatacgatcaaaataattactatcaagccggcgcatatttcccgggtcttgtttagactttaacccagtttttgcttccactgcggcagtgagcgtatgtaataaatcaacgttttgaagatgatttttcacacaaaaatttgacgcataatcagcgagctttgattgtactagcgtttgaacaacaatcccatcagctgcttttgcttcttctaatgtttcaagtaaagcgttttcatcgcgaataaaagcgtggcgccgaatatcagctggtttattaagtgaaaactgagctgttaccgcgcgaataatatgttgagcagtttctccgatagcatctgaaataacatatataataaccggattttccatatttgcctcctattaaaccttttttattgtatctacaaaaagcgcagtaatacgtgtttttgatatttttccgacgactttcgcttctcgagagttattttcaaaaacgggaagcgaatcgatttgatgaaagacaagctgttctgctgcgtgcaagactttatcatttttagtaacagtaacaaggtttggcatgcgcgtcataatagtcgcaatgggagtggctttcgtatctgcatccgccagtgcgcctttcagtaagtcttttctggagacaagcccaactaattgttcgtcatcaattacatataaactgccaatatcttccataaagagcatcacaatggcgtcataaacacttgtttctttttttgcgaaaaatggttgggtcataatatctgctactttcaattggcgaatttcatccaaatgaatcggatttgtttcgagtcctgagtaaaaataaccaactttaggtctggcatctaaaattccggtcatcgtcaaaatcgacaaatcagcacgaatcgtagcacgcgttaattttaaatgagcagcgatagagtcaccagtagcaggctcattcgcgcgaacaaaggcaacaatctggtgttgtctagaggaaagttcgattggaatcacatccttttattatgttatgctaaacattatatagtatgacataattaaaaacaagtcttaattatgtcatactatataaaaaaaccttctcattatcgagaaggttttaaaaattataatttaaacataaaacaaaatgcagaagtacataaaagcagttcccgcgataacaaataaatgccaaatcgcgtgcatataaggtactcgagggatactataaaaaattgcccctacagtaaacataatcccaccagttgcaagtagccaaaatccggttggcgttagccctgcataaagtggtttaatggcgaacatgaccatccagcccattactaagtatacaaacgtcgataaaagttttaatttgccagtcataaatattttataaatgatcccagcaattgcgagtccccagataacaccaaacagcgtccaaccgagagttccttgaatggtaatcaaaacaaatggtgtataactgccagcaattaaaacataaatcgcggcatgatccataatattaaaaaccgttcgtgctttgcaaggtttgaagctatggagcagtgtggaacaaatataaagcaacattagtgaaattccataaattaaaaaacttgttaaataaagaggattatcttttccagcggcgaatattataagtaagacgagcgcgggaatactaaggataaatccaaccccgtgcgttattgcattcgccagttcttctttccaattataagaagtgacattcattttatcaccatacttttctacaaaatttttgtgggttgttacatttctatcatacgctaaaaaagtaagaatagaaagacaaataccatttctttctcttttcttaaaactagtttataggttgtgtataacgccgggaatgttataataagagaaaataagcaaaaatggatgtggctaaatgagaaaaataaagattatcacagactcaactgcaggcttaactcttgaagaagcagcaaaatggaatattgaagttttatatttaaccgtagaaatcgatgggaaagtttataatcctaaaacagacattacgccagaagaattcatggtacgcatggctgaaacaaaagaattaccaaaatcttcgcaaccagcaatcggttcttttgtagaagcttatgaaaaatatacggcagaagggtatgaaatcctttccatccatttgacggaaaaactaagtggtacagtgaatgcagctcgccaagcagctgatatggtggaaggaaacatcaccgtagtagactgcgattatacggcacgtggccaagcattccaagtactaaaagccgctgaaatggctcaggctggcgattattcagtagaagaaattcacgctgcaattaatgatattcgcgacaaaacaaaactttatattgtggtcgtaacgctcgataatttaattaaaggtgggcgtgttggtcgaatgcaaggtttcctaggtagtcttttgaatatcaaattaatcgctaagcttactgatggacaattggaagaagaaaccaaagttcgcagtaacaaaaaagttttacaatactgccttaatctaattaaagacgaaccgaaaaaaattcaacagctggatgtagttcatgccaatgggctgaatttagctgatgactttatcgcagagtctaaagaaataactggattaacagaaattccactattttttgcagatcctgtcatttccactcatgctggaactggcgcgtttgcatttatgtactatactgactaagtgagtgattgcatatgacaaagaaaaaatggctgtggcttacaggaagcgtgcttattatcgcgcttctcgttggcgcagtttttggtatcaagtattataaagaatcaaaagaaatccctattaacctagttgcaatgggtgactcattaacagaaggtgttggtgatgaaaacaaagaaggcggctatgtgggcattgttccagaaaaactaaatgaagaagctacagtgtctagtgtgaaaacgagcaactacggtgtatcaggaaaccgtattacacaactagaaaaacgcctcaaaacgaataaacaattccagcaagatgtcaaaaatgccaatgtaataactattacaatcggtgggaatgacgtgatggctattttgcaatctcgccttttaaatgtagatgtggctgattttgcaaaagcaaataaagaatttcaacaagaacttacaacgttacttaaagatattcgctcttacaataaagatgcagcgatatttttaatgggtatttacaatccttatacgacttattttgcagatataaaacaatttgatgaggtcattaccaattggaatgatgcttctgcgaaaacaattaaacaaactaacaatgcttatttcgtcccagtggctaaagcattagaagatagaaatacatccaataaagacaagccgaatccattactttcagatgattatttccatccaaaccataaaggatatgaaaaaatgagcgccgagttagaaaaagctatcgtcaaacaactagatgatggtaatattcctaaatagaaaggtgataaaatcttgcaagtagaaacaagatcagctccaaaaaaaccaaaacgaaattattggaaatggatttgcctaactttaattagtttgcttatccttcttgctggctggctttatgtaacagtctttgtacttagcccacaagaagagccaacgccttcgcttattagcaataaatcaaatattgaatttcaaacaagcaccactaaatcagacttaaaccaattaatcagtagctatatagaagagttcagcaaagagcaagatatcggttataaagtttttgtagcaaataatgtcaattttacagctgaagcgaagatttttggtgagcctgttgaactaagacttaaattttcaccaaaagtagttgataatggaaatatagaattatcgctgacagatatgtctgttggagcattacctttaccagtttcttacgtgatgaactatgttaataaaaactataaattccctgagtgggtcactgtacttcctaaaaaagaaaaaatatatttatctttggacaaattaaaactaaaaggcgacacaaaagttcgtgccgatacgctaaatttgaagaaagacgatatttcgtttacacttttagtaccagttaagtaatttaactggcccaatcctagttagggggcattttttatgacaaaagaatcacttgaaaaagcaacatttgctggaggatgcttttggtgtatggtaaaaccttttgacacacaaccaggaatcgagaaggtcgtttcgggttatacaggtggacatacagtgaatccaacatataaagaagtttgcagcgggacaacagggcataccgaagcagttgaaattacatttgatccggcagtatttccttatgaaaaattagtcgaagtatactggcaacaaacagatccgactgatgcagcgggacaatttgtcgaccgcggagattcatatcgtccggttattttttaccataatgaggaacaacgacaaatcgctgaaaaatctaaagcagctttggatgcaagcggaagatttaagaaaccagttgtcacagaaattgcaaaagcagaaactttttatcctgcagaggaatatcaccaagatttctataaaaaagaaaaagcgcactatgaaggttatcaagtagcttccggtcgtgctgcattcatagatgccaactggaaagggtgaagtcaaatggatgaaagtaaaaaaaacgagcgacttaaacagctaacagatatacaatataatgtgacccaaaaagcggataccgaacgcccatttcaaaatgaattttatgataatgtggcaaaaggaatctatgtagatattgtttcaggaaagccgttattttcatccaatgatcagtatgatgctggttgtggttggccaagtttcacaaaaccaattgacgaagcagaagtaatcgaacatagagatttatcacatgggatgattcggacggaagtgaagtcagttgaggctgattcgcacttagggcatgtttttccagatggaccacaagatcaaggtggacttagatactgcatcaattccgcagcgcttcgatttatccccgttgataagttagaagaagaaggctaccaaacctataagaaaatctttgaataaacaaacgatgccagaaaatgaaatgcgtagaataatatcgcgaaatcattctctggcattgttatgaaaaaggagcgaaatgtatgttgaaagtagcagtagtgggactcggtggaattgcacaaaaagcgtatttacctgtttttgctgagatggaaaatatcgaggtccatctttatacaagaaatgcacaaaaattaaagcatttaagcgaaaaatatcgttttgatcattatcatcaaagtattcattcaatgatagaatctggcgttaatgcagcttttgtacattcatctacagcaagtcatccagaagtaattcggacttttttatcacataatattccagtttatgtagataagccaattgccgataatttggccgaagtggaagaattgacgcgcttagccgaagaaaaaaacacgctattaatgacaggatttaaccgtcgttatgcacctaaatatcaagaattaaaagcattaacggatataaacatgatagtaatgcaaaaaaaccgcgcaggacagccaggtgaggcacgtacatttatttatgatgattttatccatgtcattgataccgtccgttatttacttgatgcaaaaattgatcaattacatgtggtacctgtttggcaaaacgaattactgtctagtgtaactgtccaaatttctgctggcaataaagtagctactgccatcatgaaccgggatagtggtgtgaatgaagaacgtttagccgtgatgacaaaaagcgctaaatatgaagtggaaaatgtaacagagacacatatttatgaaggaacgaccgagcgttttgaacggtttggtgactgggaaacaacgctttataaacgcggctttgtaccgattattcaggcgtttttaaatgctgttcgaaacggcgaaaaagctccaattactgaagaagatgcattagagacacatcgactagcagaagaaattctaagtaaacttgaaaattaactttatttttcacgagaaatcaactatagttaaagcataaaaagagcggagtgtgttgtacgttgggaagatcattttatcattttttaatgacatatcgggacccgaagctaacagatcagaaaacggaatttgccaacaatgcataccgagatcatagttttccaaagcaaacaagaaattatcatattctttgtgactatcttgagtttaatgcgccttatttaccgggaatgtctattttcgatgaactttgggaagcgtatttgctagatgaagagaaaaacaaacattaggaggagaaaattatgagcgtacatatcgaagcaaaacaaggggaaattgccgaaacaattttattaccaggagatcctttgcgtgcgaaatacattgccgaaacattcttagaggacgttgtattatttaaccaagtaagaggaatgctaggatttactggtacatataaaggcgaaaaagtttctgttatgggaactggtatgggaattccgtcaatttcgatttatgtgaatgaattaattcaaagctatgatgtgaaaaatttgattcgcgttggaacaatgggtggcattcaagcggacgttaaagttcgtgatgttgtaattgctcaagcagcttcgacagattctcaaattaatcgtaacacttttgctggtgttgactttgcgccagtagcagatttttctttattaaaaaaagcgtatgatgcaggcgttgaaaaaggcctatctctaaaagttggtaatgttttctcagcggatcgtttttataatgatcaattggataaacaacaattagccgattacggagtactgggaattgaaatggaagcagcggctctttatacattagcgcaaaaatatggccgtcgtgcacttgctattctaacagtcagcgatcacatttttacaggtgaagaaacatccgctgaagagcgccaaactacttttaatgatatgattgttgtagcattagaagcagcaataaaataatcaaaattactaccttagattttgacttaatgtatacaggaaggttgataaacatatatgagttctttattaacaattgctttagccgttactatcagttgtgtaaacacggtagaagatcaatatttcggcgggcaaaatgcagagccagtcgctaaagtggagcaaaaagccacaagtaataatacacttgctgacttagaaaaagatccgctttatccttacattgataaacaaaataaattagtcgaaaaaaatgggattcagtatatcgaaaacgaggaaaatatattagtacttgctaataaagattattccttgcagccaacatataccccccctgatttagttcgaccaaatgttactttttcttttgggaatgaacaagtagaaaaagcgcaattaagaaaagaagcaggaacagcccttgaagaaatgttcaaagcagcaaatcaagatggtaagaaactttttgctgtgtcgggttatcgttcttataaacgacaacaagaggtattccaagctgaagtaaattccaaaggggataaaaaagctagagaagcagtggcttaccctggaacaagtgagcaccaaactggattagcaatggatatttcctcagaaaatcaatcatatgaactaactgaagcatttggaactaccccagaaggtaaatggttagaagaaaatgcccataattacggctttatccttcgttatatgaaaggtagagaagatattacgaaatatcaatacgaatcttggcattatcgttatgttggcaaagacgctgcaacaatcatttacaaaaacaactggacattagaagaattttttgaacatgttaaagcactacaaaagaaagtagatgccgcaaaataacaagctttagagccataaacatttagttgtttatggttctttttttatttttaaaaattaaatgtttgcaaaatatacctatagggggtatactgttaattgtagaaacaaaggaggagaaaatatgaaacatgaccaacccattgttccacgcaaagatgaagaaacgaaattacttcaaaatcgtttgcgacgtatcgaaggccaaattcgcggtatcgctcaaatggtcgaggatgatagatattgtacagacatcttagttcaaatttcagcagcgaataaagcacttaaaaatgttggcttgcaagtattagaacatcatacagcacactgtgtcgtggatgctgcaaaaaacggagaagatgacgtaatggaggacttacttaaggctatacgtcagttttctaaaacctgaggggggtatttagagtgaatgataaatatgtaagacaagatttgaatgtttttggaatgacatgtgcggcttgttcaacaagaattgagaaatctttaaataaagcagaaggtgttgaaaaagccaatgtcaatttagtcactgaaaatgcggctgtgtattatgatccagaagtgaccacgacagaagaattaatcaaagtcgtgaagcatgctggttatgatgctgcagaaaaaatgtcaaaagaagaaaaagacgccgttttagaaaagaatttcaaaaaagaagtgagaaggtttattctttcagcggtgctctcactgccattacttttaacgatggttactcacattccgtatattcatgaaatggcgtttgcggaaacaattggtaactggattaatccaaccattcaattagtactcgcaaccattgtccaattttatattggttggcggttttatgatggggcttataaggcgcttcgaggtaaaagcgcgaatatggacgttttagtcgcacttggtacatccgcagcttacttttatagtgtagtggaatatatccgtcatatgattgatccaagcgtgatgccgcattattactttgaaacaagtgctgtattgattacgttgatcttattaggtaaattactcgaatcatatgcaacttcgagaacgacagaatctattgccggattactcgaactacaagcgaaagaagcaactgttattcgtgaaggcaaagaatggttagtaccagtagattctctcaaaattggtgatattattctagttcgtcctggtgaaaaagtgccaatggatgcagaaattatctccggagaaacaagcattgatgaagcgatgattactggtgaacccgtgcctgtagagaaaaaaccaggtgattctgttattggagcgactatcaactttgacggagctttccaagcaaaaattacgaaacgaatggaagaaaccgttttagaatcgattattcgtttagtggaagaagcgcaaggaattaaagcgccaattcaacgtttggcagataaaatctcgggtatttttgtaccgattgtacttggaattgcagctgtaacatttattatttggtaccttgtaacaggcacggtagatggatcattagaagctgcaattgctgttttagttattgcttgtccctgtgctcttgggctcgcaacaccaacagcgattatggccggaactggtaaaggcgccgaaagtgggatattatttaaaggcggggaacatttagaacgtacttccaaagtcgacacaattgtttttgataaaacaggtactttgacagaaggtaaattagaagtaagtgataaaaaagcaagcaacgataaatttttcccttatttattcttgatggaacaacaatcagaacatccaattgccaaagcgattatcaacatgttagaatctgaaaaaatcgatgtatcagatgtaaaacaaggaaaaatccgcgccaaagctggacatgggatgacaggtaatttggatgatagtaaagtggaactaggcgcttatcgctatgtgtcttcacttacaactatcccgagcgaagaagatgaattaatccaaagttggatgaatgcagggaaaacggttgtagcaatggcaatagacggtacttatgccggggcacttgctttatccgatacaccgcgaccagaggcaaaagaagcaattcaaaaactgcaagcacaaggtattaaaacagctatttgttccggcgaccaatctgtcgtagtagaaaatatggcgaaagatttaggagcagatatgttttttgccgaacaactaccaaacgataaaagcgcattagtagaaaaactacaacaagaaggacatattgttgcatttgttggcgatggtattaatgatgctccagctcttgcagcgagtgatattggcattagtattggaacgggaacagatattgcgattgaaactggtgatgtaacgctcgtaagtcaccgtttaacacttattccagaaacaatcgaactttcaaaagcaacgatgcgaaacatccgacaaaactttttctgggcacttgcttataactgtgcgggtattccagtagctgcacttggcttacttgccccatgggtagccggacttgcgatggcatttagttccgtttcggttgtaactaacgcactacgcctaaaaagatataaatttaaatcataggaggaaaagaaaatggaaaaattaacattaactgtagaaggtatgacttgtggacactgcgaggctcgcgtcaccaaagctttatcagaagtaagtggtgtaaaaagcgctgtagtttctttggatgaaggaacagcaacggttgaattcgaaaaaggtcaagtaactgaagatgctttaattgatgctgtagaagaagcaggatatgaagtagcttaagtttagaagcgagagggattcctgagtgaatccctcttttttctttgtcatgaaaaaaagataccaaaatgtttggaaaactggtaaaataaatgagttaaataaaatgtactattattagttacattttacatagaaagtggtgaagaaagatggaacaatccccacaaaacaaagaagaaaaagtggagaaacccgaagaagaaaaaacaaaacctggcaatggttatataaaaatgaaattattcccatttataatgcttttatttgcttttgtatttgttaccgcattagtaacaacgatcgtcatgtctttaggggatgataagcaagtgaaagtcagcatcccagagcgaaaagaattcacaaagctctatgatgtctatgatgaaatctctgagaaatactataaagacacgaaatccactaacatgatagatggagcaatcacaggtatggtaaattccttagatgatccgtattccacttttatgtcgaaaaaagaatcggcggaatttaatgacacaatttcttctagctttgaaggaattggtgctgaaattcaagaaaaagatggagctatcgtagttgtctctccaattaaaaactccccggctgaaaaagctggtttgcgacctcaagatattattacacaagttgatggtaaatctgtcaaaggcgatacagcgacagaagcaactaaaaaaatccgtggtgaaaaaggaacggatgtcactttaactatccaacgttcaaatgaagataaaccgtttgacgtaactattacacgtgacgaaattccaatcgaaacggtctataaagaaatgggtaatgacaaaatcgcccacgtaactattagtaccttctctgaaaatacctatgatgagcttgaaaaagcattaaaagctttggaaaaagatggtatgaaaggacttgtgattgatttacgaggaaatccaggtgggttactcgatcaagcagtctctatttctagtttatttgttcctgatggcaaaattgtcgttcaagaacaaggaaaagatggcgataaatccgccattaaagccgatagcagctcacatggtgattataaagttaaagtaccaacaacaatgcttatagatggtgggagtgcaagtgcatcagaaattctggcagcagcagcgaaagaatctggcggcattaaacttgtaggaaataaatcgtttggtaaaggtactgtgcaaacagcgaccactttatctgatgactccacacttaaattaacagtcgcaaaatggttgacgccaaatagcgaatggattcatgaaaaaggtattacgccagatgtggttgtgaacatgccaagttacgcgaccatgactattccttcctccacaaaagtctacaaaaatggcgattttggtgatgatgtgaaaacaatcgaaacattgctaaaagcgctagactacaacgttggaaaagtagatggcttatacgatatagatacagaatatgcagtacaaagatttcaagcagcaaataatttagatgttacgggaattatgaccggcgtgacaacggataaattagttgaactaacgcaaaaacatctaaaagaaacagatccacaactacaaaaagcaaaagccttggtgaagtaaacgcataacttttttgaaaaactggaggtagcaaaaaaatggaaacatacttagaaattgaaacattgattaagcgaatttttaatagttttcgtcatgaggtagaagctgttcttgacaaaagactaagcggtagcgaataccgtgtcttgagtcttatttctagcggattaacgaaaacatctgatttagctaaaacgcttgatgtttcagccagtcacatcacagccattacagatactttagtcgaagagaaattaattactcgtcatcgttctgaagtagaccgccgtattatcgaattaaaattaacatctaatgccgaggaatttgtcaaagaaattgataaaaagaaaaaagaaatgattgttaaacgttttgctgttttttccgagtacgaacaagcggaattccgcaaattactaaaaaaattagcagatggctcacaatcaaataaatagtaaaaatcctgtagttaataaaactacaggatttttttagacattttactttacaaaaaaataattgttcgttatactttggattaaagttgcattaaggaaacatttttagttaagtataaaaaatagtcttatgggaaaagggtggtagaaatgaacattcaaggtttaacgatagcatataaacaaaaagtggcgattgatgatgtcactcttcaaatagcaacaggaaaattaactgggattgtcggtcccaatggtgctggtaaatctacattattaaaaggaatgatgggattagttccacgcgaaaaaggccaagtaacattagataataagcctctcacttattggagaaagaaaatcgcttatgtcccgcagcgtagtgaagtagatttaacttttccaatcactgtttttgatatggtacttcttggtacttatccggccctgggattaataaaacgccctggtaaaaaagaaaaacagctggcatttgatgctttagaacaagtggagatgacggcatttagtaaaagacaaatcggcgaactgtcaggtggtcaattgcagcgtgtgtttattgctcgtgccttagcgcaacatgcggaaatcttctttttagatgaaccatttgctggcattgatatggctagcgaagcgcttattatgaaattgttaaaaaagctaagagataacggaaaaactatcgtagtcgtccaccatgattttcataaagtagctgcttactttgatgacattattttactcaataaaaaattagtggcacacggtccggtagaacaaacatttacagaagaaaaaattcaatttgcttatggtgacgcaccggtagcatttgcggcgggggtgtagagatgctgtttttagaaggattaatgcaatatggttttttacaaaaagcgcttattacttccgtgacagttggtattgtatcaggtgtaattggtagttttatcattttgcgaggaatgtcgttaatgggtgatgcgatctctcatgcggtgttacctggtgtagcaatttcttatatgatggggatgaacttcttcataggtgcagcaacattcggcattgcagcagcacttggcatcggctttgttaatcaaaaaagtcggattaaaaatgatacagcaatcggcatcgtgtttagtgcatttttcgcgctcgggattattttaatttcatttgcgaagagtagtaccgatttgtaccatatcttattcggaaatgtgcttgcggtgcggagttcggatatgtggatgacaattattatcgcgatactggttatttcgctagtcgcaatattttataaagaatttctagtaagctcatttgatcctgtgatggcagaagcatacggtttaaatgtgcggttcttacactacttcttaatgctactgctgacacttgtgacggtttcggccttacaaacagttggaattatcttagtagtggcaatgttaattacaccagctgcaacagcgtatctcctcacaaataaattatctaaaatgattatgctcgcttccacatttggcgcagtgagtgcaattattggactttatttcagttacattttcaacttagcatcaggtgcggcaatggtattagttgcaacaattattttctttattgcctttttattcgcaccaaaacaaggattattgttttctaaaaagaaggaggttatcgaatgaaaaaagttatagttgggacgcttttcgctttagtattagtactggcggggtgttcaagccaaaatagcgacacgaaaaaaacaggggacaaattaaatgtggtggctacctactccattttagcggatattgtaaaaaatgtcggtggggataaaattgaactccatagcatcgtaccggttggcgttgacccgcatgaatatgatcctttgccagataatattcaaagcgcagcagatgcagatttaattttttacaatggcttaaacttagaaactgggaatggttggtttgaccgaatgctcgaaacagctgataaatcaagagatgacaaagaccaagtagtcgagttaagtaaaggggtaaaaccaaaatatttaacagaaaaaggaaagacttctgaaacagacccgcacgcttggttagatcttcataacggtattatttatacggaaaatgtacgcgatgcccttgtaaaggctgatccagacaatgctaatttttataaagaaaacgccaaaaaatatatcgataaactagcaacactggataaagaggcaaaacaaaaatttgcagatttaccagaaaatcaaaaaacattagtgacaagtgaaggggcatttaaatattttgctgctcgctatggtttaaaagctgcgtacatttgggaaatcaacacggaaagtcaaggcacacctgaccaaatgaaacaaattattagtatcgttgaaaaagagcgagtacctaacttatttgtcgaaacgagcgtggatccgcgcagtatggaaagtgtatctaaagaaaccggcgtaccaattttcgctaaaatcttcacggattctactgcgaaaaaaggcgaagaaggcgacacttatttagaaatgatgcgctataatcttgataaaattcatgatggtttagctaaataaaaaaacgcagagattaactcgaaatctctgcgttttttgcatttaaagaaagcttacgttccgttttacgaacccgaatggataaaataaacgcggcgacaaacaagccagtactcaatcctatccagtaaccaaatggtcctaaatttgtaaaggataacccgtaacctactgggagtccaattaaccaataggagataaaggcgataatcgaggtaattgcaacatctttataaccccgaagcgccccaagaacaggtgataaaacggcatctgcaaattgaaataatatcgcatatactaagaaatgcataattaaatcacttaattctgcgtcattcgtgtagaagccagcaataatatcacggaagaaaaacagtatcgctccattaatacagccaattagaatcgctgccgtcataccaatatggcgatattgtttggcatcttttaaccgttttgcgcctgtttcgtaaccaccaagtattgtcagagtggaagcaacactaagaggaaacgcataaagcaaggtacaaacactattggctgattgatgcgctgcaatcgtctccgtcccaaaagcacccattaaaatcgtcaccgctgagaaaatactcgtttcaaataaaattgttaacccatttggcactccaatcccgataatttcttttactttggaaaaacgaagcgctgtgaggcctttaaaaataccgaatttacgcaatctcgtttgtgtttgaatcagaatcacactaactaaaacaacgagccagtacgtaatccccgtcgcataaccactaccagcaccacccatttccggaaaaccgaagttcccaaaaataaagcagtaatttaaaaagatattaaacggaactgtacaaagcgtaattaacatggtgactctggtcaaaccaagcgaatcaatgaatgagcgtaaaatcgctgaaataaaaaaagcgggaatcccaatacatatcccatttaagaagtggcgagcgatatgcgcaacttctgcggtgacaggcatatgcgtcaaaatcgttggaacgactaaaaaattaataagaattaaaataaaagctaaaaataaagcaatatataaaccattatgcacggtgtttttgacttgtttttctttcttcgccccgattaattgagcgataattggtgtgatagccattaataacccagaaaaagcggcattcactggagcccaaaatgaactaccaatcgctacaccagccagcgcctgattcgaataatttccgctcatcgttgtatcaaaaaatgtcatggagaaaagcgtgagttgcgtaatgacaatcggtgtgaatatcgttaaaaactgtttccatttagctccgtatgtgactgtttgttgcaagtaatcatctcctttttacatccttaaagattatagcataaataaggcaatctggcggcgtaacaaaaaacttttcctttcgtatatgtactatctttgttataataaagttctgtggcaggggcaatactctgcgggttgggagagggacaatttcataatgaggaaaaagtatgcagaaatttttcaacaaagtatttcggctgaacgagcataaaaccaatatccggactgaatttttagctggtatgattggcttttttacggtggcatatattattgtcgtcaatagctcgattttagctgaggctggagttccttatcaaggagcagtccttgcgacgatttttatttcggcgttaggttgtttgattatgggattttgggcaaatgcaccacttattctaatgccaggaatggggattaatgcgctgtttgcgtatacccttgttcaaggaatgggactaagttggcaggttgcacttgctgctgttacgatgagtggcttattatttatgattcttgcgttcacaccacttgcaggaaaactaaataaagctatcccgctcattttaaaacaagccattacggtcgggttaggtattttcttaatcttcctagggcttgaaaaaggcggaatcgtaacaagtgggaaacatgccataattgcagttggagatttaagcgatccattcgtcttagcaacactagttacacttttactaacaatgattttagttatccgaaaaattccaggcactttcttatggagtttaattatcggaacacttgttggagtaatgtttggtgtaaccgggaaagctgatggcgcttcgattagtgttgcgccgtggagtgatgttctctttaaagctgatttttctgggatggcgagcgttagtttttggagcgccgtctttacgatgacaatggtcattgtgtttgaaacggttggtcttacaaatggtcaagtaagacaactaaaacaaaccgaaaaattaccacgcgttttaaaagcgagctccctaactgcctttttatctggcttatttggtacaagtccaaccatctctgcgcttgaaagtggttcgatgtttgcgagtggagcaaaaaccggtctggcaacaataacgactggtctgttctttatcgcatcccttttcttaatgccggtattatcttttattccgaacagtgcaatcgcgcccattttagttgtaattgggatgtcgatgctgcaagaatttaaagaaatggatttatccaatccggcagaaactttttcagcactactgattattgtgttaatcccgctgacgtatagtattgcagacggaattgcggctggttttatcgcgtatccaattcttcgcgcttttacgaagaacgaagaacgtacttcaccagtcatgtatgtgattgcagctttatttttgcttcaatttatcatacaataacaaagaagcaatgcgctcttcttaagtttaaaggggagcgcgtactttttatctaactgatgtgaaaagagggttcgaaaaatgtattattatctaatcaccctagccgtgattgcgctagaccaattgactaaatggattgttgttcaaaacatggaaattggacagaaaatagaagttattcctggatttttatactggacaagctatcgtaatgacggagcagcttggagtattttagaagggcatatgtggtttttctatcttattactgtaatcgttattggaattataatttatattatgcaaaaatatgccaaaggaaagcgactattttccattagtttagcgtttattctaggtggtgcgattggtaattttatcgaccggatcttgcatcaagaagtggtggattttgtacaaacagtgtggggaaattattacttcccaatctttaatgtggcagatgccgcgctttcagttggtgtcgtactaatgctcgtgtatgtttttgtagacgaccgcaaaacgaaaggaattaaataatgcagaatgaaacattgattatagaagagagtcacgcccgggaacgtgtggataaagttattgctgaaatgatggaaaaaagtcgttcagcgatacaacttatgctaaaaaatggcgatataacggtaaacggagaacttgcgaagccgaattataaagttcaagtaggagacgaaattcgttatgaagctcgtgaaccagaagaactggagattttagccgaagatattccacttgatatttattttgaagacaaagatatgctcgttgtaaataaacctgaaggaatggtggttcatccatcagctggtcatgcgagtggaacgcttgtaaatgctttattatttcattgtgatgatttatctggtataaatggtaaaattcgtccagggattgttcaccgaattgataaagatacatcgggattgcttatggttgcgaaaaacgaccatgcgcatgaatcactagccaaacaattaaaagataaaacatctgatcgagaatatatcgcactcgtccatggtgatattgtccatcaaaaaggaacgattgaagcgccaattggtcgagcaaaagaagaccgtcaaaaaatggctgttgttcgtgacggcaaagaagcgcggactcattttgaagtaattgagcgtttgcctggttatactcttattaactgtaagcttgacacggggaggacacaccaaattcgtgtccaccttaaatatattggtcatccgctagctggtgatccaaaatacggaccaaaaaatacaataaaaggtaatggacaattccttcatgcggccaaactaggatttgatcatccgacgacaaatgaacgaatgacctttgaagctccactaccagattcttttgaacaagcgcttaaatcattacgacaagaaaactaaaaaagaagcaagaatgcctatttaatggcgtttcttgcttctttttctttgataagtgatttagttgcttgacgtaaagtagcaaatgttttaatgcctttttgctcggtcaagttggcttgtaccattattttggcggtttccggctgcattccggtaatgattggtgtcactccgacaagtttgagtgaagagaagaagtgctcaatatattcgccaatattagctgaatcaaattgtacgccagataagtcaataatcaaatagtttacgggttgttcgcacgtttcaaaaagagccgtttcggtaatttgttttgcccgttcatccgttatttttcctataagtggcaaaagaaatactttttcagcaagccaaattagttttgttgaacttttgatgatttggttttctttttgttggactaattgttctgtagcgagtgtgtatccttcgattaaatgttgtgtgaaactactaaatacttggtggagtttgatgctaaaaagatataactcgcggtaattattacattctgcatttatttccgaggcataatctagtaaaaattcttctagtaaacgaatatgaaataaaatgcgtgaaatgccaagtgatgtaataaattgtgcctttcctaattcacgagcgaatgtattcatttttgcaaggtcttcggtcataccaataaataaattttccaagacaaaaccggtttcgtccattaggcggtggtcatcttttaaggcaaaaacatatggatcatccacagatacataatacgtaagccaacctttaacgacggtttctttctgttgtaataaactattcataatgctcattctattcacctcttaagtagatgtttttttagctattaaagcatagcataaagcataaaaaaagaggaataatttctagagtgagcccattattttaaaccgttttatgtataaaatgtgaaaacttaaaaaaaaccgcaaaaaaaagaatcatcttcttggtgattcttctttttcctactataaagatatccttttttagtttttgtttgcttggagcttaggtcaattagtgcaaaggggcttcgtttgatttctggatttaaacgaccttcacgcactagtttttggcgtttctttttcgctttagatgtagccataattttggcctcctttattttattataaacagtataacatgttttatatttttttgattgacagggagagttctttcaggtaagatgaatctaatgaaataaagtcctttaacatagtccagagaggctaagaaggtgacgataatttgacgggttatttgtatactcgtacgcgttcccttgcttacactggcagagggttatttttttgcacaaaaggagagatttcggatgcaaaaacaagtagttgtcatggacgaggcggcaatcaaacgcgcgcttacccgggttagttacgaaatcatcgaacgaaacaaagggacaaagaatttagcgcttgtcggtattaagactcgtggtatttatcttgcggagcgtttgcataagcggatacttgaaattgaaggtattgacgtgccagtcggggatattgacattacgctttatcgcgatgacttatctttcaaagatgataaaacgcgcgaacccgctgtacatgggacgaacattccatttgatattaatggaaaaaaagtcgttcttgtagatgatgtgctttatacaggtcgaactgtgcgtgccgcaatggacgcattaatggatgtaggtagacctgcgcaaattcaccttgcagtactggctgatcggggtcatagagagcttccaatcagagcagactacgtagggaaaaatattccaacatcaggtaacgagcgagtagaagtgcgtttgaccgatgtggatcattcagaagatgcggttattatcaacaaaaatgaataacaatgtaacacttttttaaaagcagtcctgtgaggctgacaaagagtgattaatttctataggggattattctatactctttgtcgaccgaggcaaggggtattttttatgaagaaagagggaagaaaatgacagaaacgacagaaacagtgacaaaaccagtactagatatacacgaaaaaccaagctttaataaatggattattcttagcatccagcaccttttcaccatgtttggctctactatctttgtgccaagtgtgacagggttaagtccgggagtggcgcttgtatctagcgggctcgggacacttgcttatctaggaattactcgcgggaaaatccccgcatatctaggttcttcctttacctttattgcaccaattacagcattacttgcagcaaaatctggcggagggccgggcgcagttatggtcggaactttctcagtcggagtagtttatgcaattgtttctttgattgtttattacgcaggtgttgattggattcaaaaagtattaccgccaattgttgttggaccagttattatggttatcggtttgtcgctagctccaagtgcggctgcgatggcgatgggaacgaacaatggtaaatatagtttagaaactttaactgtagcaataatcacgctccttgcaaccataatcgccatgatgtttttcaaaggatttatgggcttgattccgattttgtttggcttcacagtaggttacttaacaagtatggctttcggtatggtagattacacgttaatcaaaaatgcctcgtttttccaagtaccagatttcagtattccatttgtaaatatcgacccagttattactgttacagtcatccttagtatggcgccactagcgtttgttacgatggcagaacatatggggcatcaattactacttaatcgaatcacaaataaaaactttttcaaagatccaggacttcatcgttccttgcttgcggatggtactgcttcggttatcgcatcgttaatcggtggaccacctgtaacaacatacggtgaaaacattggtgttctagcaattacaaaagtatatagcgtgtttgttataggaggcgcggcagttttcgctatcctcttcggatttatcggctacattaatgcagttatcacctcggttccaacagcagttctaggcggaatttccctgctactctttggggttattgcgacaagtggacttcgaatgatgattgaaaacaaaattgatttaagtgtcaatcgtaatatgattatcgcttctgttgtactagtagtaggaattggcggcttgttcattaaagctggaacgttcgaactatctggtatggcactcgcagcagtcattgggattatcttaaacttagtcttaccagccgagcataaatcagcataacacaccacaaaaaacctctgcagacaaaatttcacagaggtttttgtataaaatgaatgagaaaaggtggcgctttgaatgaaaaatttgttgtcaatggaagcattaaccgtccatgaaatcgagcatttattagagcaggcggcacagtttaagcacggaaaaaaagcaactttgaaagaacaagcttttgcagtaaatatgttttttgaaccaagtactagaacgcatacgagttttgaagtagcagagaaaaagttaggagtagaggttgtgtcctttgacgcagcaacttctagcatgacaaagggcgaaacgctttacgacacactgttaactatggaagctgtcggagtaaatgtagcagttatcagacattctgaagaaaactactatgccggacttgataaattaaatattgctatcgtaaacggcggagatggctgcggggaacatccgagtcaatcactactagacttattcacgataaaagaacaatttgggacttttcaagatttaaaagtggcgattgctggcgatataagacacagcagggtagcgaactcaaatatgaaagtattaaaaagacttggagcgaagttgtttttctccggaccgaaagaatggtttgatgatagctacttagaatacggcacatacctacccgtcgatgagattgttgaaaaagtcgatgtgatgatgctgttgcgtgtacaacatgagcgacatagtggaacagaacaatttacaaaagcaagttatcacgaaaaatttggacttacggttgaacgggcagcgaaattaaaacaagatgcaatcatcatgcacccaagcccagtgaaccgcgacgttgaaattgctgatagcttagttgaaagcgaaaaatcacgcattgttacgcaaatgacaaatggcgtttttataagaatggcaattttggaatcaattttaaaagaacaggaaatgagggcgaaagtatgtacgtattaaaaaatggtcaagtgttaaatgaatcaggcgaactagagaacaaagatgtacttattcaaaacggcaaagtcaacttgattgcagattcgattgaagtaacaagtggcgaagaatttgatgcaacgggaaaactaatcgcaccaggctttatcgatgttcacgtacatcttcgcgaaccaggcggagaacataaagaaaccattttgacaggaacaaaagcagcagcacgcggaggttatacaacgatttgttcgatgcctaatacaaaacctgttccagattccaaagaagtaatgaacagtttacaagcaaaaattaaagaaacagcagaagttcgagtgttaccatacgcatccattacaacgagtcttggaacggacgagctagtagattttgaagctttaaaagaagctggagcatttgcttttacagatgatggcgtgggcgtacagctagccggaacaatgtatgaggcaatgaaacgagcagcagcactagatatggcaatcgttgctcactgtgaagacaactcgctcatttacggcggagtggtccacgacgggatttttgctgaaaaagaaggacttaaaggcattccaaacattgcagaatcggttcaaatcgcgcgtgatgttttactagcagaagcagccggctgtcactatcatgtttgccatatttcgactaaagaatctgttcgcgtggtacgtgatgcaaaacgagcgggtattcgtgtcacagcagaagtttcgccacatcacttgatactcgacgaagaggacattccgggaaatgacggcaactggaaaatgaatccaccacttcgcagcaaagaagatcgcgcagcacttttagaaggattactagatggaacgattgattttatcgcaactgaccacgcaccacacgcagcggaagaaaaaaatgtcccaatggagcaagccgcatttggtattgttggtttagaaacggctttcccgctgctatacacccattttgtcaaaacgaacgaatggacgttaaaacaacttatcgactggatgacagtgaagccagcagagtgctttaaactcccatacggaaaactagaagaaggcgcagtagcagatattgtcgtacttgatttagaaaaagaagcaactattgatccagctactttttactcaaaaggaaaaaatacaccatttgttggagaaacgtgtatcggctggccggtagcaacgtttgcagaaggagaacttgtatacaatgagggggaaaacaaatgacaaagcgaattttaatgctagaagatggcaattactttatcggtgatgcaattggtagtgaaaaagaaacaatcggtgaagttgtttttaatacgggaatgactggctaccaagaaacaatcacagacccttcatattatgggcaaattatcacttttacgtatccacttgttggaaactacggtgtgaaccgcgatgattttgaatccattaatccagctgttaaaggagtcgttgtgcgtgaagccgcagagtatccatccaactggcgcaaccaaattactttaaatgaatttttaaaagaaaaaggcattcctggaatcgcgggaattgatacgcgtaaattaacgaaattaattcgtaaagaaggcacgctaaaaggaattttatcagcagcaacagcagacaaagaggaattgctacaccatcttcgttctgtacgcttgcctgttgaccaagtacatgaagtatcttcggctaaagcttttgcaagtccaggcgatggtaaacgagttgtccttgtggattatggtgtgaaaagctcgattttacgagaactgaataaacgtaattgttatgtgacggttgttccttataatacaactgccgaagaaatccttgccatgcatccagatggcgtgatgttatcaaacggacctggtgacccgaaagacgtacccgaagcgctagaaatgattcgcggtattcaaggtaaactgccattatttggaatctgcttagggcaccaactatttgcactagcaaacggagcagatacgtttaaattgaagttcggtcaccgtggcgcgaatcatccagtaaaagaactagcaaccggccgcgttgacttcactgcgcaaaatcacggttatgcggtagaaaaggaatcgcttatcggcactgatttaaaagtaacgcatattgaattaaacgatgaaacagtggaaggccttgcacacaaggaataccaagcgtataccgtacaatatcatccagaagcaaacccaggtccaagtgacgttaactacttgtttgacgaatttatggaaatgatgaatgtgaaagaggagggtgaattacatgcctaaacgtgacgatataaaaacaattcttgtaatcggctctggcccgattgttattggacaagcagcggagtttgactatgcgggaactcaagcctgcttaagcttaaaagaagaaggttatcgggtagtattagtgaactcgaatccagcgacgattatgacagacgcagaaatggctgacaaagtatacattgagccaattacacttgattttgtatcgcgcatcattcgtaaagaacgtccggatgccattttacctacgcttggaggacaaacggggttaaacatggcgatggaactttcagctgcggggattttggatgaatgtaatgtggaagtacttggaactgatttgacagcgataaaaaaagcggaagaccgggaagctttccgtgatttgatgaatgaactaggtgagccagtaccagaaagcgatattatccataatttagacgaagcttatacttttgtagaacgaattggctatccggttatcgttcgcccggcttatacgttaggtggttctggcggcgggatatgccataatgaacaagaattaattgagacagtaactagcggattaaaattaagcccagtaactcagtgcttactagaaaaaagtatcgctggatttaaagaagtagaatatgaagtaatgcgtgatgcgaacaataacgcgatggttgtttgtaacatggaaaatattgacccagttggcatacataccggcgattcgattgttgttgcaccaagtcaaacactttccgaccgtgaataccaactgttgcgggatgtttcattaaaaattatccgcgcactggaaattgaaggtggctgtaatgttcagctagcacttgatccggatagttacaactactatgtaatcgaagtaaacccgcgtgtgagtcgttcatccgcacttgcctcgaaagcaactggttacccgattgcaaaactagcagcaaaaatcgcagttggcttaacactagatgaagttagaaatccagtaacaggaacaacttacgcgcattttgaaccaacgctagattatgttgttgcgaaaattccacggtttgcttttgataagttcgaacaagcggatcgtcgccttggcacacaaatgaaagcaactggagaagttatggcaatcggtcgttcatgggaagaagcccttctaaaagcagtacgttcccttgaaattggcgctgaccatttactactcgaagaagctgaaaatgctgacgcggaaacattagaacgcaaaatttgtttcccagaagatgatcgcttattcttcttagcagcagcattgcgccgtggtcaaacaatcgaacaactacacgcgaaaacaaaaatagatttattcttcctatacaaattaagtaaaacgatcgaactagaaaatcgcttgaaagaaaacccgcaaaacgaagaaattttagcagaagcgaaacgagcaggtttttctgacgcgtttatcgccacttgctggaatatcgacgaacaagcaatatacgacttacgaaaagcgcaaaatcttttcccagtatataaaatggtggatacatgtgcggccgaatttgagtccactacgccatacttctatagcacctacgaagatgaaaatgagtcgatacgctcaagtaaagaaagcgtaattgtacttggctctggtccgattcggattgggcaaggggtagaatttgattacgcgacagtacattccgtctgggcaattcaacaagccggttacgaggcgattatcatcaacaataacccggaaacagtctctaccgactttagtatatcggacaaactgtactttgaaccacttactttagaagatgttatgcatgtaatcgaaatcgaacaaccacttggcgttgtcgtacaattcggtggacaaactgccattaacttagcagatgggcttgcgaaacgaggagttaaaattcttggtacaagcttagaagataccgaccgtgcagaaaaccgcgacgcttttgaaaaagcattagaaatcttacaaatcccacaaccagctggaaaaacagccacttccgtagaagcagcgatcaaagtagcaacggatattggctacccagtcttagtgcgaccatcttatgtacttggtggacgggcaatggaaattgtagaatctgaagaagcgttaaaacattatatgacaaatgcagtaaaagttaatccgaaacatcctgtgttagtcgatcgttatgttagcggtcaagaagtagaagtcgacgcaatcagcgacggcgaaaatgtattaatccctggaatcatggaacacattgaacgtgccggtgtccattctggtgactcgattgccgtatatccagcacaacgtttaagcgaacaggtgaaaaatacaattgtagattatacgaccagacttgcaaccggcttaaacattatcggtatgcttaacatccagtatgttgttgacggtgaagaagttttcgttatcgaagtaaaccctcgctcaagccggacagcaccatttttaagtaaaatcacggaaatcccaatggcgaatgtggcaacaagagttattttaggagaaaacttgattgaccttggttacacgccgggacttgcaccagaaaaacaagaaatttttgtgaaagtacccgtgttctccttcgcgaaattgcgtagcgttgatacatcacttggacctgaaatgaaatcaaccggggaagttatggggaaagacgttacgcttgaaaaagctctctataaaggctttgtagcaagtggaacaacgatgcatgattatgggacagtactgctaacagttgctgaccgtgataaagaagaagcagttgaactagctaagagatttaatcgcatcggtttcactatcatggcgacaaaaggaacagccagcacactagaagaagcagaaatcccagtttcacaagtgaaaaaaattggtgaaaatcaagaaacattaattgattacattcgaaacggccaagttacgctcgtagtgaacactttaactacaggtaaacgtccagaacgtgatggtttccaaattcgtcgtgaatctgtcgaaaatggcattccagtttgtacgtcgcttgatacagcagaagcaatcttgcgtgtacttgaatcacgctccttcgaactagaatcaatgaatgccagtgaagttaagcaacctaaagcacgtgtataaatagaagaaacggggtggaaccgtgttacagacggaaatgaaagtcattcagcaaaccgaaattgcagataaagtatacgaattaatcttatcaggagaatgtgtagccgacatgtcaccggggcagtttttaatgctaaaaccaagtcgctctgatttattaatgagacgaccaatcagtatttgttcttatgataaaacggcaaagacatgcattctcttataccgggtagaaggagatgggactaaagatttcagtagtctttcaaaaggagattctatcgatgtgttaggtccgcttggaaaaggttttgatttaaatactattccggcaccaaaaaccgctcttttaatcgggggtggaattggtgtccctccaatgtatcaacttggtaaagagctagctgataaaggcgtacaagtcacgtttgtaaacgggttccaatctgaaaaagacagtttttatgaaaaagaaatgacagaatacggcactgtgcatattgcgacagtcgatggatcatacggaacacaaggctttgtcacggatattacgaaaaattttccagaagagccagacgttatctatagttgcggaccaaaagcgatgttacaagctgtgaaagcaagttttccagaaacaaaaacatatctttctttagaagaacgaatggcttgtggaattggagcttgctatgcatgtgtttgtccaaaagctggggatacgaagaagcaatttaaagtgtgcgaggatggcccagtatttcgtgcagatgaggtgagtttatgaatcgattagcggtagaaattccaggattatccttaaaaaatccgattatgccagcatctgggtgttttggattcggacaagaatatagcaaatactatgatttaaatgaacttggtgcgattatggcaaaagcagtcacaccagaacctagacttggaaatcccacaccacgagtagcagaaacagcgagcggaatgcttaatgcaattggcttacagaatcctggtttggaacatgttttagcccatgaattaccatttttagagcaatttgaaacgccgattatcgccaatgtagcaggtgcgacggaggacgattatgttcaagtctgctcccgaatcggggaatcaaaagcagtaaaagcaatcgagctcaatatttcttgcccaaatgtgaaacacggcggcattgcttttggaacagatccggaagtagcgcaccgtttaacaaaagccgtgaaaagtgtcgcaagtgtgccagtttatgtaaaattatcaccgaatgtagcggatattatttccatcgcccaagcaattgaagcggcgggggcagatggactaacgatgattaatacgttactcggtatgcggatagatttaaaaactagaaaaccagtcatcgctaatggtacaggtgggctttcaggtccagcgattaaaccagttgctatccggatgattcatcaagttcgtgctgtaagtaatattcctatcatcggcatgggcggcgtgcaaaccgttgatgacgtgctagaattcttaattgctggggcagatgcagtcgcagtcggaacgatgaattttacagatccctttatttgcccaaaattaattaccgaactgccaaaaagaatggacgaactcggcatttcttctctacaagaacttaaaaaggagctactaaaccaatgaataaaccaattatcgcgctagattttcaaacttaccaagaagtagaggcttttttagcccagttttccggagaatctttatccgtaaaagtcggtatggaacttttttatagtaacggtccagccattgttgaaaaaataaagcaacaaaatcatgctatttttctagatttgaaactccacgatattccaaatacggtcaaaagtgcgatgattggtttggcaaaactaggtgttgatatggtgaatgttcatgcatcaggcggaaagaaaatgatggaagctgctcgtgaaggtcttgaaataggttcaacaagtggcaaacgtccaaaacttatcgcagtgacacaacttactagtacaagtgaaaccgacatgcaaaaggaacaattagtaaaggctagtcttcttgaatcagtgctacattacagtgatttaaccaaacaagcagggctagatggtgttgtctgctcagcactcgaagcagacgaaattaaactacaaaatggttctgactttttacgcgtaacgccaggtattcgattagcaagtgatgcgacagacgatcaaatccgcgtcgtaacacctgaaaaagctcgttcgattggatcatcgaatatcgtcgttggtcgctctatcactcgagcaaacgacccagtagcagcatataatcaagttttgaaggagtggaatgcatgagtattgaaaaacaagttgcggaacaattattagaaattaaagcggtatttttaaaaccaaacgagccattcacttgggcttccggcattaaatcacctatttactgtgataatcgtctaacactaggctttccaaaagttcgtcaatttatcgctaaatcgttagcagaaaaaatcaaagaaaattttggcgaagtagatgttgtagcaggaaccgcgacggcaggaatcccgcacgccgcttgggtaagcgatttactagatttaccaatggtctacgtgcgttcgaaagcaaaagaacatggcaaagggaaccaaatcgaagggccacttactaaaggacaaaaagtagttgtgattgaagatttgatttcaacaggtggaagttcgcttaaagcagttgaggctttagaagaagctggagcggaagtactaggaatcgcagccatctttacatatggattagataaaggtaaaaaactactggaagaatctaatacaaaactagtaactttaacaaattatgacgaactgattgaagtcgctttaaataaaaattacgttactactgaagatatggcaaccttgaaagaatggaagaaaaacccagaagtttgggggaaataaaaaaacagctcacctctaccggtgagctgttttttattaatatacttgataactttcacccgtttgtgcaccaaaaacacttttttcaaacgcacgggcaacttttgcagcaggaactgggaggaaaccttcgaaaaatggttctagtttatcccaagattcttctagtacattcgggctcactgtattaatccgaattccgcgtggcatttcaatagccgcagattttgcaaaagcagttactgcaccgttagccatggcagcggaagccccttgaacgattggatcttccatcataatcccagtcgtaagtgtaaagcttcctttatcatttaatgagtcaattcctagtaaaacgagattaatttgcccgcctaatttactactaattgtcacagcgtttttctctggagttaattccgttaaaggtgaaaaagtggcactcccagttgctgaaacaatcgcatctaccttacccacttgttcgtacattttttttatactatcaatatttgttatatccacggtaacatcaccactatgtctaccagcagtaatcacttcggcttttttctccaaacgttctttcaccgcagaaccaagcgtacctgaagcgccaattaataaaattttcatttgtctatcatccttccaataaaaaagtaaagtcagtataatatctaccctaaatttgaaagaaaaaacggctccgcgagggaaccgttaatttttcagcgctaaaacaagtgtttcatctggtgtgacaaaatatgttgtttgattatcgtaaataacataaccaggtttagcgccatttggttttttaacgtgttttacaagtgtgccgtcgactgggacagttgctgaaagacgtgctttggagtagtaggcagcaatcatcgcagcttctgtaatggaagtctcatccgggttatttgactgaatcacaacatgcgaaccgggcaaatccttcacatggaaccagtattcattatttcgagctaacttattcgttaaataatcattttgtttattatttttcccgactaaaattgataagccggttgaagaagtgtatttttcaggtgtgggtaaagtagcttttttacggctgccttttttctgtttgtaacgaagatagccttgttcagctagttcttggcgaatttcttccacatcttctggaccggaagtttctagttgggcttcaacggactctaaataagaaatttcttctttagtaagtacgatttgctcttttactacttcgacggcgttacgtaatttttgataacgactaaagtaactttgcgcattggcagatggcgtttttctagagtcaagcgggatcgtcatttttttcatatcatcgtaaaaattttcgacggtaatttcttccattccgcgctccattaaatgtaaattggctgttagaagctcaccttggatgcggtaaacgtccgctttttctgtttcaagtaaggtgttttcgagtttttcgattttcagcctacttctagagagttcattagaaatcagtttttccaaatcatgtgcaaattggtgaacacggtcacgacgcgctttgccgatataaaaatgatctaaaagggcacttaaattagcgaattcagttgtcacagcatcaacatgacggagcgggaagaaataataatcttccttattttggatccgccattcgtttggaacagcggcacttcctaaatgctcattcactagcccaatcacttcaaaaaaggcagaaacaagtgagtcggctgttaaatttccagcacgaaaaacaatttctcgagcgagtaatggactaaatcctgcaaaattttgtacgagttgtttgtcgattcgacctgctgtaaaatcaagtctatccagaatttgctccgaattaacctcgaatgggttcagtttatctgatgcaggcggtaacacgtaagtcgcccccggtaaaagtgtccggtaactattttgtgctggagagacgtgtttaatacagtcgacaatcacatttttcgcacgatcgacaagggtaatattactatggcgccccataatttccacaaataagtcgcaaaaacggttttcgccaatatcatctttcccgcgaatactaaattgtaaaatccgttcattaggaagttgcgtgatagactcaataattgctccttctaaatatttccggagtaacatacaaaacattggtggtgttgctggattttctggaatatcatctgtccactgaattcgggcatagctagggtgcgaagaaattagcagacgtttattttcacggttttttcgaatatataaaacaagttcatgcgaaaatggttggtggattttcataatacgaccactttcaccatgttccgcaagttcttctgtcattgcttttaaaaacattgcatcaaacgccattagttattcattccttttttgagttagttactttctattttaacatacattccgaaaatgtattgtatgcatgaagtagctttggtataataagaagtcagaacaaatttcaagtaatcttagagggaactttaagttatgaaaggtgtcttgccaaatggtgaaaagcatgacgggatttgggcgtgctacgaaagaatttgaagcgttcaaagtaaccattgaattaaaagcagtcaaccaccgctactccgaatttctttttcggatgccaaaacaacttgcttatttagaaggaaaattaaaaaagacgataagtaagcaaatcaaacgtggtagaattgaatgtttcttttccatcacaggagagcaaatttcaaaacgtgaactacatattgattgggacctcgcagacagctattaccgttttattaaacaagcaagcgctcgatatgaattacaagaattacctacaatgaccgatttacttcaagaacaagcttatctttctattgaagaagaagtggaagcaagtagcgagctagagcgactagttttagacacacttgcccgcgcaaccgagcgactggacgagatgagaagtatggaaggagcagaattactgctatatttcaaacaacatcttacagcactcgaaacaagtttggaaatcattcaagccgaaattccaaatacagaaaaacattatcaagaaaaaattgaaactcgcttacaaaacgttgtgggcgaccaatttgatcctagtatcgttcttacagaagtcgcaatgctacttgaaaaggcagatattaatgaagaagtagaacgaactaagagccatttaaagcaattttatggtattattttactcgaagaaccaattggacggaagctggattttcttatccaagaaatgaaccgcgaaatcaatactattggatccaaagcaagttctctaaaaatcaccgaacaagtggttgaaatgaaaacgacgctagagaaaattcgggaacaagtgcaaaatgtggaatgatatgcaggaggggaaatgatgacagaaagaggactgttaattgtactttcaggtccatctggagtaggtaagggaactgttcgggaagctgtttttaaagatccggaaacaagttttgattattctatttccatgacaacgcgtcttcctcgtgaaggcgaacaagacggtgtcgattattattttcgttcacgagaagtgtttgaacaagctatcaaagacggaaaaatgttagaatatgcagagtacgtcggtaactattacggcactccgcttgaatatgtcgaggaaaaactagccgctgggatagacatttttctcgaaattgaagtacaaggagcaatgcaagttcgaaaagcgatgccagaaggaattttcattttcttaacgccaccagatttatccgaacttaaaaaccggattatcgggcgcggtacagaatcgatggaagttgtcgaggaacgcatggaaacagctaagaaagaaattgaaatgatggcgtcttatgattatgctgtggtgaatgatgtcgtatcaaaagccgtacaaaaaatcaaaggcattgtcgaaacagaacacttaaaaaccgagcgagtaattcatcgctacaaaaaaatgttggagggattacaatgatgttatatccatcaattgataatttattgctaaaaatcgactcaaaatattcgctagttactgtggctgctaaacgtgcgcgctacatgcaattagaaaacgataaaggtgtattaccaagctaccaatctgataaatttgttggtaaagcgttagaagaaattcacgctggaaaattagttttacaaaacgacgagaaataagcctaactgctccgcttcattgcggggcttttttgttagctggacttatcataaaaataagcagaaatctagtttcttcatggttttgtcctgccttaatttaaggtataatagaactaatgattttttataataaaatgaggtgacttatcgatgcaaggaaaaaatattttactcgcagtgtcaggtggcattgctgtctataaagcagtcgcacttacaagtaaattaacgcaagcaggtgcaaacgttaaagtcatgatgaccgagcacgcacaagaatttgttccaccgctttcgtttcaagtattatccaaaaatgatgtatataccgacacctttgacgaaaaaaaatctagtgtggttgcacatattgatttagctgactgggctgatttagtaattgtcgcaccagcaacagcaaatctgattggtaaaatggcaaatggtattgctgatgatatggtaacaacgactattctagctacagaagcgccagtttgggttgcaccagcaatgaacgtccatatgattcaacatccagcagttattcgaaacattaacagactatatgcagatggcgtccgttttattgaaccagaagaaggttacttggcatgtggctatgttggccgaggtcgcctcgaagaacccgaaaaaatcgttctccgtattgcggaattttttcaagaagataaagacctacttcaaggcaaaaaagtactcgtaacagctggcgcgactcgcgaaaaattagatccagtacgatactttacaaatcattctacagggaaaatgggctttagtatagctgagtcagcagcacgtcacggtgcaaatgtaacgcttattacgacaagcaaaacactacccgtaccgccaggcgtagaagcggtatatgttgaatcggcggatgagatgtatcaagctgttttagaacgtaaagccgaacagcatattttcgtgatgacagcagccgtagcagattacacgccagcaaatgtttcagagcaaaaaatcaaaaaacaaccaggcgattttacaattgaaatgaaacgaacaaaagacattttacttgaaatcggacaaaataaaacagctgaccaagtagtaattggctttgctgctgaaacagaaaacctagaaacaaatgcacttaaaaaactcacgtccaaaaatgccgatatgattgtcgcaaataatattagcgaagcaggcgcaggtttttcaggagatacaaatattgtcactttataccgaaaagatggatctaatgaggcattaccgttactagacaaaaaagaagttgcagaacatatcatcgaagaagccgctaactttttaaggaagtgaacgaatgattaatatagcaaaagttattgtggacgttccagccatgcaagtggatcgtccatttgattactttattccagaagatttagaagatcttattcgtcctggtatgcgagtgagtgtcccatttggaaatcgtaaaatacaaggctttgtcatttctcttggcgaaacagaagaaaatccgaaattaaaaggtattgaggctgtcatggatttggcgcctgtattaaacgaggaattgatggaactaggtgattggttagcggaggatacccttagttttcgcgtctctgcttatcaagccatgttaccagctgcactacgggcgaagtatgaaaaatattttttacgtttagatgaagaaaatgaagcgctagaacgattattcgaaggctatgaaacacttgattggaaagtagcagagtcgcgcggcttactcaaagaaattggcaaatgggtaagagaaggtagcgtggaagtcgtctaccaagtgaaaaataaaattacaaacaaaaaagttcgtgtcgttagctgtttaaaagcgccgcaccaactagctgaaataatagaagatatgcctaaaaacgccaaagcacaatcacgtgtattagcattttttcaagcatttgaaggaaccgaaattgccgctgcagaactaaaaaaacaagcagaaacaaccgatgcaacaataaaaaaattagtagatttaaatatactcactatccaagaaaaaatcatttcacgcgatccatacgaaaatcaccaatttgaaaaaagtgagtcgctccagttgctaccagatcaagcgttagcctgtgagaaaatcattgcagcaaccgagcaagaaaccttcttaatacacggcgtcaccggaagtggaaaaaccgaaatctatttacaaacaattgaagcaaaattaaaagaaggtaaagaagctatcgttttagtgccagaaatttcccttacaccgcaaatggtagaacgttttaaaagtcgctttggtagtgaagttgcagtactccacagtgccctttcttccggagaaaaatacgatgaatggcgtaaaatcgaacggaaagaagcacgtgttgttgtaggagctcgttccgctgtgtttgcaccatttgaaaatttaggaataattattattgatgaagagcacgaagcaagttataaacaagaagataatccgcgctatcatgcaagagacgtagcgatttggcgcgcagaaaagtaccaatgcccagtcgttctcgggagtgccacaccatctcttgaatcttttgctagagcgaaaaagggcgtttatacattaattgaacttccaagccgagtgaatgatcgtgcaatgccggaagtacgagttgtggatatgcgcgaagaattgcgtaaagaaaaccgcactgaattttcgactgaattgttagagaaaattaaagaccgaattgccaaaaaagaacaaaccgttttaatgctaaatcgtcgtggttactcttcttttgtaatgtgtcgtgattgtggttatgttgtcgaatgtcctaactgtgatatttcgctcacttatcaccagtctagcaaccaaatgaaatgtcattactgtggtcatgaagaacgtgtccctaagcattgtcctagctgtgaaggcgaacatatccgttattttggaacaggtactcaaaaagtagaagaaagcctaacgaagctgattccagaagcacgtgtaatccgaatggatgtagatacaacaagaacaaaaggcgcccatgaaaaattactcaaaagctttcgtaaccatgaagcggatattttactaggaacacaaatgattgctaaggggctagattttcctgatattacgttagttggcgtattaaatgcggacaccatgcttcatttgccagattttcgtgcctcagaacgaacttttcaactgctcacccaagttagtggccgggcagggcgccatgagcgaactggcgaagtagttgtccaaagctataacccagagcattacagcattgaatttgccaaacaacatgactttatcggcttttataatcacgaaatgaagctcaggaaaatgggttcttatccaccattttattacttaacgatgattaatgtcagcgatgaaaatgaaatgaaagccattcgaacaattcaagaaatggcgcagtttttacgaggaaagttaggtcctgatgccgttattcttggcccagtaccaagcactattacccgaattaaaaacaaatatcgttaccaatgtattattaaatataaaattgaaccaaacttaaaaaaagaactaaaaacactaatcacccattaccaaaaagatcaacaaaaaggcttaacgataacgattgacgtacaaccatacgtattaatgtaaaaggagtaaaccgatgacaaaaattatttttatgggaacacctgcattctctgtcccagttttagaacaattagctagtgcttatgatgtgattgcagttgtcacacagccagaccgaccagttggacgcaaacgaattttaaccccaccgcctgtaaaaaaagcagctttggaattaggaatcccagtttatcaaccagaaaaattacgcacatctagcgagctagaagaacttatttcattagaagcagatttacttgtaacagccgcatacggtcaaattctacctaatacgctacttgaatcacctaagcatggtgcgattaatgtccacgcatcacttttaccagaatatcgtggcggggctccggtccattatgcactgcttgacggaaaaacagaaaccggcgtgacgattatgtatatggttgaaaaattggatgcgggtgatatgataagtcagcgcaaaattcctattacagaggaagataacactggtactatgtttgataaattaagcaagcttggtgcagaattattaatggatacattacctgactttttagcgggaaaaattaccgctgtagcacaagatccagaaaaagtaacttttgcgcgaaatatttctagagagcaagagaaaatcaattggacaaaaccaggacggacgatttttaaccaaattcgtggactttcgccttggccagttgcttatacgacacttgaagaaaaaccttttaaaatttgggaagcaacgtttgaagatacaaaaacaagcggcgaaccgggcacgattttaacagataaatcaacactcaaaatcgtagcaggtgacggcacacttattgtcccaacagtaatccaaccagctggaaaaccgaaaatggatatccattcattcatgtctggtgctggcagaaatctaagcaagacgacaaggtttggtgaataaatgaaaaaacaaaaaacagttcgtgcaattgcattagagctcatcattaaaatcgaaaacaatcaatcatacagccatctattaattaacgacgcgctaaaaaaacagaagttaaacccgcttgataaaggacttttaacagaattagtatacggaaccacacagcgcaaaatcacacttgattattacttagcgccgtttctaaacaaagaaccagataactgggtgaaaaatctattaagaatgtccgtttaccaattaacctttttagataaagttccagaacacgccattttaaatgaagcaggcgatattgctaaagaccttggacatcaaggcgtgacgaaatttgtcaatggggtattacgaaatgttatccgtaaaggcgtaccaagtattgatttaattaaagacccagtacaaaaaatcgctgtcgaaacaagcttgccagaatggttagcgagaagatgggctgatcaatatggtctcgaaaaactacgtgaaattggtctggcattcttagtagccccgcatcaaagtatacgcgtgaaccaaacggaaattcgcgccgagcagctaatcaaagaattaaatgaccaaggtatcactgctactcgcaacgaatttatcgatgaagctttactcgttgaaaaaggctctgtagctgaaacaaaagcttataaagacggcaaatgtagcattcaagacgaaagttcgatgctcgtagcctatgcgcttcaactagaagacaatttaaccgtactagatgcttgtgcagcgccaggcggaaaaacaacccatatagctgaaaaaatgcatggtactggaatggttcatgcacttgatattcatgaaaagaaaaccaaactcattgatcaagccgccaaaagattacaacttttaaacattcgtacagctcatctagatgcgagaaccgcaagcacaatgtttgaaccagaaacgtttgaccgtattttagtcgatgcgccgtgttcaggatttggtgttcttcgcagaaaaccagatattaaatacgcaaaaacagaaaaagatattcataaattagcagaaattcaactagcaattttagatgatgttagccaattagtaaaagaaaatggtatattagtttatagtacttgtaccattgacaaggaagaaaacgaaacagtcttgcgcgcattcctagaaaaacatccagaatttgcactagaacctgtagtacttcctgaaaaattggcacaaattaagaaggacgattttgtacaacttttaccaacagatatcggaagcgatggattctttgtttccagcttaagaaaagtgagtcctgaaaaatagtgaggtgcgtataaatgcatgcagaatttagaacagacagaggcagaataagacatcataatgaagataatggcggcgtatttgaaaacaaagataagcagccgattgtcattgttgcagacggtatgggagggcaccgcgcaggagatgttgcgagcgaaatggcagttcgtctacttagcgacgcgtggaaagaaacgaccgctcttttaaccgcagaagaaattgaaacatggcttcaaaaaacaatccaagaagtcaataaagaaattgtactttacgcggaaagtgaaatggatctaaatggtatggggacaacccttgttgcagcaattatggctcagtcacaagtagttatcgccaatgtaggggatagccgaggttatttacttcaaaacgatgtaatgcgtcaattaactgaagatcactcacttgtacacgaacttctaagaactggcgaaatcagcaaagaagatgcgatgaatcatccgcggaaaaacattcttttacgagcactaggcgtagaaggaaaagtagaagtagacacatttgtagtaccatttcaaacgagcgatacattattactttgttccgatggtttgactaatatggtcccagaagctgaaatggaagaaattttaaaaagtaaacgaactctttctgaaaaagccgatgtatttattacaaaagcgaattcttacgggggagaagataatatcactgtgttgttagtagaaagaaatcttatgcagaaagggagggatgcttcatgatgattggtaagcgactaaatgatcgatacaaaattttacatgcgataggcgggggtggaatggccaatgtctatcttgcgcatgatataattcttgaccgcgatgtagctgtaaaaattttacggattgatttagcggatgaaagcaaccttattcgcaggtttcaacgtgaagcccaatcagcaactagcttagtgcatcctaacattgttagtgtgtacgatgttggcgaagaaaatgatttacactatatagtgatggaacatgtggatgggatggatttaaaacagtatatccaagaaaatcacccaattagctatgataaagctgtagacatcatgcttcaaatcgtttcagcagtagctatcgcacatcaacatcacattattcatcgcgatttaaaaccacaaaatattttaattgatcatgatggagtcgtaaaaattactgattttgggattgcgatggcactttctgaaacatccatcacccaaacgaattccttacttggctctgtccattacttatcaccagaacaggctcgcggtgggatggcaactcaaaagtcagacatctattcgctcggaattgttttatatgaactcctaactgggaaggtaccttttgacggagaatcggctgtttcaatcgctatcaaacatttacaagcagaaattccgtctgcaagagcccaaaacccagaaattcctcaaagcttagaaaatattattattaaagcaacagcaaaagatccatttttacgttatcaaaacgcagaagaaatggaaaaagatttgcaaacctgcttaaataaagatcgtctaaatgaacctaaatacgtttttccaaccaatgatgatgatggcgacacaaaaacaattccaatcatcgccacaaaagaagcgatgcaaaatctagataaaaccatcgttccagaaggtaaagtagctgcagaagaagtagctgtagacgataaaaaaggtaaaaagaagaaaaaaatgagcaagaaaaagaagattattttaatcgtgtcttccgtaatcgttcttttcattattggtattttactgttatggcttttaggtaaaagtcctgatgaagtcgctgtacctgatgtttctggtaaaacagaagaccaagcaattgccttactgcaaaaagatggctttgttattggtaaaacagcagaaaaaaatagcgatgacgtagaagaaggcaaagttattaatacggacccatcagcgggtgaaatgaaagaaaaaggcacgaaaatcaatttatttgtaagtataggttctaagaaaattacgatggaagactatactggtagaagttactctgagactaaaactttgctagagcagcaaggtttcaacaatatttctgcagaagaagcatatagttctgaagttggtaaaggaatgattattagccaaacgccaactcaaggaacggaagtagttgctaagtcgacagatgtaaaatttgtcgtaagtaaaggcgcagaaccgattacacttaaagaccttcgtggctatacaaaaacagctgtagaagattatgcttcaccacttggactcaaagtttcgagtaaagaagaaaactccaactcagtagaaaaagggcaagtaatttcgcaatccccatcagctggaacggcaataaatgcaggcgatactattgaaatcgttatttctgctggaccaaaagaaaaacaagttaaagaagttacaaaaacatttaacatcccttatacaccaagcgatgaagaaaatccacaaccacagaaagtccaaatttacattcaagacaaagatcatagtatgacaagcgcataccgagaaatgaatattacccaaaatacctcggtagaagtgactttccaaattgaagaaggttctagcgcaggctacaaaatcatcagtgacgataaagtaatcgatgaaggtacagtcccttatccaaattaaaaaagagaacggaggaaatgtgctggaaggacaaattatcaaagcgttgagcggattttactatgtattctctgaagggaaaatataccaatgcagggcgcgcggaaattttagaaaacgaaatatttccccgctagttggtgatgacgtagaatttcaagtagaaaataagacggatggttatattttagatgtgttatcacgggagaatgcgctagttcgccctcccgtggcaaacatcgatattgcgattcttgtgttttcggcagtagaaccagatttttctacaaacctggcagatcgtttcttagtcgcaatcgaaaaagaagacatccaacctgttatttgtattagtaaaatggatttagcaacagatgcggaaaaagaacaaattgcggtttataaagaggtatatgaaacaattggctacgacgtttttgtaactaatgatgaaccagataaagaagcaattaaagactacattagcggaaaaacagcagttattgccgggcaatcgggtgtaggtaagtccactttattaaatagtttaaatagcgatttaaccttaaaaacggccgaaatatcgaactcacttggacgtggtaaacatacgactagacacgtagaactaatgccgattggtgatggctttgtagcagatacgcctggctttagctcgattgagtgggatgatttacaaccagaaacattacaattttgttttccagaaatggaagatcgtcgtagtggctgtaaattccgaggttgcatgcatgacaatgagccgaattgcgctgtaaaaacagctgttgaagcaaatgaaatagccgattttcgctacaaacactacatccaaattttacaagaattaaaaaacagaaagccgaggtattaaaaatgggaaaaatagctccttcgattttaagtgcagactttgcaaatcttgcaagagatattaaagaagtagaaaattacggcgcggattatatccatgttgatgtaatggacggacatttcgttccaaatatcactttcggtcctgctgtcgtaaaagcgattcgtccggaaacaaaactaccacttgatgttcatttaatgattgaaaatcctgatacatacatccctgaatttgcaaaagcaggcgcggattatattaccgttcatgtggaagcgtgcacgcatcttcaccgcacattacaactcatccgttcgtacggagtaaaagcaggtgcagtactaaatcccgcaacaccaattgacgtattacaacatgttttaaatgaactagatatggttttatttatgacagtaaatccaggctttggcggacaaaaatttattccagaggtactagaaaaaatttctgccttcaaaaaaatcgtggatgaaaaaggcttagacatcgaaatcgaagtagatggcggcgtggatcatgaaacagcgaaattatgtcgagatgccggcgcaaatgtttttgtagctggaagttatatttatggaaataaaaatcgtcaaacgccaattgacaaattacgagctattgtaggcgaataatatttgggggctgggacagacttttcgttccagccttatttgttaggaaagaagggaacacaaatatgaaaataattaatatcatggttggtggacctgcgtcagaaattcctgatttaacacaatatacgaatacagatattagttgggttggcgtagaccgcggggctaaacgtttgttagatagaggaattgttccgaccgttgcaatgggagattttgattctttaacaaaagaagaattagctcatttaaaaacaaaagtagctgatgtacatgaatttcctgccgaaaaggatgaaacagatacagaaattgggctaagctgggcaatggaacaaaaaccagataagatacgcatttttggagcaacaggaggccgtttagaccacttacttgcgaatctgatgatgctaacaaagccacgattcttagacgctgtgccggttgtagaaatgattgatcgctataactatatcaaaatgtatacaccaggaagctatacaattgaaaaattgcctgataaaaaatatgtagcattcacaacaatgaaagatgttacaggacttacactaaaaggattcgtttatccacttgataatgccacttacccagtaggttcggcactttcgagtaatgagtttgtcgatcaaattggagcgttttcttttaaaactggaatgattttattaacacaaagtaatgattaatgagaaatacaggtgattttcgcctgtattttttatttttagacaaagaaaaaatgcaccgacatgattgtcgctgcacttgatttctccttcgattaaacgcgttccactttaccagatttaagcgcacgagcagatacccaaacttttttaggtttgccgttaaccagaatccgtactttttgcaagttagctttccaagtacgtttgctggagttcattgcgtgggaacgtttgttaccggaacgtgatttgcggcctgtaataacacattctttagccatagtttacccctccttacagagctcttcggataatttatttaaaataacctatccttttgtttttcatacactagaataatttatcataaacaagtatactttgcaagaggatatgcgaaaatagtgcaaagaatttttacttgacagcataaatgcggatttaatcagccaaatttgtgatatgctttccaaagggctgtgattatagtaaaataggtaagaacaactaaactagcaattaaaaacaataataaaaaaataatcgaacgagaatataatccgtagggaggaatatagaatggcaatcgaaatcgacacaaagcttggcaaaattgatattactagtgatgttatcgcaacaatcgctggtggtgctgccgaagaaaattttggaattgtaggtatggcaagtagacatcaaattcgtgatggtttaaccgatattcttagaagagaaaattatacaaaaggtgttattgtaagacaagaagaagaaggtatacatattgacatgtatatcattgttagctttggaactaaaatttcagaagtagctcataacgtccaagaacgcgtgaaatacacactagaaaaaacactcggtattacagtggaatcagtgaatatttatgttcaaggtgtccgagtaatcaaggaatcataaggaggattatgtaagtgagtatatatcagttagacccagagaaatttgcagcaatgatagcgcttggagcagaaaatttagcgaaaaatgctgattttgttgattcattaaacgttttcccggttccagatggtgacacgggaacaaatatgaatttatccatgacaagtggagcagaagaagtagcaaaaaatgacaaagaaacaattagtgccgttggagcaaaccttgcaaaaggcttgttgatgggagcgcgtggaaattctggcgttatcttatcccaacttttccgaggcttttctaaatcaatagaaaataaagaaacacttaatgcagaagaatttgcaaatgcctttgtaaaaggtgtagagacagcttataaagcagtaatgaagccagtcgaaggaaccattttaactgtagcacgtgagctgccaaagcgggtgttcttgccgcaaatgaacatcaagaaatcgaattagtaatggaagcaattttgaaacaaggaaaagtagcccttgaaaaaacgcctgatttacttccagttttaaaagaagttggcgttgttgatagtggtggccaaggtctgattattatttatgaaggattttacggagtgctcactggtaaaatggctgaagcacctgattatatggcatcaatgggcgaattaattaatgcagaacatcatcgccatgtgcaagactttatgtccactgaggatattcattttggttattgtacagaaattattgtgaagattaacgaaaataaaccagggctaaaaccttttgatgaagaacaattccgccaagacttaagtgaactaggtgattctttacttgtagcggcagatgatgaagttgtaaaagtgcatgtgcatgtagaacatcctggtgaagttctaaactatggtcaacaatacggtagtctccttaaaatgaaagtagaaaatatgcgcgaacagcataatgaaatcgttggcgacgataaagcgccagccaaggaaaaagctccttatggtatcgttacagtttcagcaggagaaggattgaaaaaactatttgaaagcatgggcgtatccattgttctttctggtggtcaaacaatgaatccaagcacagaagatattgtaaaagccattgaatcagcaaatgcagaacaagtttttgttcttccaaataataaaaatatccaaatggctgcagaacaagcggctcaaattcttggagaagataaagtacaaatcatcccaactaaaacaattccacaaggacttactgctgtacttactttccaaccagaacaagatttcacttccaatgcagaagcgatgagagaagcaattcaggacgtagcaagtggtcaagttacaacagctgttcgagacactacggtggaaggcgttgtaattaaaaaagacagttttatcggtatggttgaaggtaaaatcaaagtcagccgcgaaactttagaagaagctgcttatgaaacattagaaaaattacttgatgatgatagcgaaatcgttactattattttcggggaagatgcagatgctaaaaaagcagaacttttagcagataaaataacagaagcttttccagatgtagaagtagaaattcatgaaggcgaccaaccagtttacccgtatatttttgcggtagagtaaagacttgttttaaatgaatagaagaaaggatgattttagtgaaatttaatagcgtgtttgatattattggtccagtaatgattggtccatcgagttctcatactgccggtgctagtcgtattggtgccattgcacgagctgtttttaatgaacaaccatcccaagtagatattcatttatatggttcttttgctaaaacgtataaaggccacggaacagatgtggcgctgattggtggattgcttggttttgagccagatgatccgcgtatgaaagaatccgctaagcttgcagaagaatggggcatgcgcatccaatttattgaagaagtggaagagccgcctcatccaaacactgtcaaattagtgttaaaacatggtatgcaacaaatgaccttaattggcgcatcgattggtggcggcaaagtagaaattattcgcttaaacgaatttgagctagaattcactggaactgctccagctatccttattttacatcaagacaaatttggcgcgattgcagcagtgtcatccgtaatcgctgaccataaaattaatatcggtcaaatgaaagtatcgcgcaaagtaaaaggcgacgaagctttaatggtaatagaagttgaccaacaagttgaacaagatttaattagcaaaattgctgaattaccagggatttaccaagtagcaagcgtaatgatttaatcgttttggtacttatctctagtaaatcggtggctttcgctcgatttgtgtaaagccaaatgtgcgtaaataaaacgtgcatttggctttattttgagttgtaaatcaggtatgttggtaatgagtatagaaagtgagtgttgataatgtttagaactgttgcagaattagtggacatcgctgaacgcgagaacctaactattgctgaaattatgattaaacgtgaaatgagtatttctggtttaccgcgggaggaaataactgctgcgatggaacggaatttagatattatggaagaagctattcatgaaggtgaagcaggcgttacttcaactaccggattaacgggcggagatgctgtccttatgcaagactatatcaaaaaaggaaacttcttatctggtgaagttttactagattcagtagcaaaagcgattgctacaaatgaagtcaatgcagcgatgggtgttatttgtgcaactcccactgctggaagcgctggcgttgtaccaggcgtacttttctctttaaaagatcgtcttgatatgacgcgtgaggacatggttaactttttattcacagctggagcatttggttatgtagttgcgaataatgcgtttataagtggggcagcgggtggttgtcaggcggaaattggttctgcaagtgcaatggcttcagcagcgattgtagcagcagcgggaggaacccccgaacaatctgcacatgcgatggcgatgacaatgaaaaatatgcttgggcttgtgtgtgatccagtagcaggacttgtagaagtaccatgtgtgaaaagaaatgcccttggttcttcgcaagcaattatttcagctgatatggcactagcaggcattaaaagtcgtatcccatgtgatgaagtgattgaagcaatgcaccgcgtagggttacaaatgccaagctctttaagagaaacggcagaaggaggattggcggctacaccgactggacgcgccattcagcggaagattttcggattgtcgccagaagataaacgtgagtgaacttaaacgaatcccgacaactgaaatcaaaggaattggtgaagaaacagctaaaactttaaaagagctaggtttatcgaccgtgcatgatttgctatggaacttcccgtatcgctatgaagattaccggttgcgggatttatcggaagtagcgcatgaagaacgaattacaattcaaggcgaagtgctaaccgaagcaactgtagccttttacggtcacaaaaaatccaagctttctttccgcgtgtcaacagaaggtcaagtcatcaaaatcgattttttcaaccaaccatatttaaaaaataaaataagcgttggcgaaacagtgacgatttctggcaaatgggataaaagccgcgcccaaattacagccagcaaaattaaaataggtgctgtcgaaaacgaagaagaattagaaggcgtttatagattaaaaggaacccttcgcaataaaacgatgcaaaaatacactcggcttgcttttgatagttatagcaaggatatagaagaagttatcccaaccaatttacttgaaaaatatcaattaatggatcggttagaagctgttcgcgtgcttcatttcccaaaaaacaatgaagaattaaaacaagctagacgccgaatggtttacgaagaattcttgcttttccaattaaaaatgcagtttttccgtaaaatcgaacgtgagaagtcgggtgggatttcgattaattatgatgtagaagatttgcgtcattatatcgattccttaccattcccgctaacaaaagcgcaaaaaagagtagtgaatgagatttgcggtgatatgttatcgcacttccatatgaatcgtttgttacaaggagacgttggatcaggaaaaacagttgtagcctcgatcgcgatgtatgcagctgctaaaagcggtttccaaagtgctttaatggtcccaacggagattttagctgaacaacatgcgaattcattagtggagctacttcaaccctttgatattacagttggtttgcttactagtagtgtgaaagggaagcaacgtagagaattactggcaatgcttgaaaatggctcaattgacgttttaattggcacccatgctttaatccaagacgaagtaatttatcatcgacttggtttagttattacagatgaacaacacagatttggcgtagcacagcgccggattctacgggaaaaaggtgaatatcccgatgtgttatttatgaccgcaacgccaatccctagaacgctcgcaattacagctttcggggaaatggatgtatcgatcattgatgaacttccagctggacgaaaagaaattgaaacctactgggtaaaacatcaaatgcttgatcgcgttatcggttttatggaaaaagaaatcgataaaggtcaccaagtttatatcatttgcccattaattgaagaatccgaaaaactcgatgtgcaaaatgcgatagacgttttcaacattttacaaaataaatggggcactaaatatgttccaggactcatgcacggcaagttattaccggcagacaaagaacaaattatgcgcgactttaatgataaaaaaattgactgcctcgtatccactaccgtagtcgaagttggcgtaaatgttccgaacgctacgatgatggtcatatatgatgcagaccgttttggtttagcgcagttgcatcaactgaggggacgagttgggcgaggggctgagcaatcttattgtattttaattgctgacccaaaaaccgaggtcggaaaagaacgaatgatgattatgtcagaaacaaacgatggctttgttgtcagcgaacgagacctcgaacttcgtggaccaggagatttcttcggtagaaaacaaagtggcgttccagaattcaaagtcgctgatatggttcatgattaccgtgtgcttgaaatcgctcgccaagatgccgtccatatgatctttgaagaaaacatgttggaaaataaaacgtacgataaattagtggcgctacttgaggaagaaggcgtcttcacagaacaaaaactagattaaacctatgtaacaaactttaaaaaaacttgcaacttggcttgatttttaataacatattaaagtaccaataaataggaggaagttctgaaggttatccagcagaggtaacttcctttttttagccagtctttagtagctggtgttaatacctttcacaaaaaaagagatgaggaaccgtgcatgaaaaaatattctaagaaggatcgacaaatgaaacttcaagttgctattgaagaaaatcctttcataacagatgagcaacttgctgaaaaatttggggttatcgtccagactatccgtttagaccgggtggctctttctatccctgaactcagagagcgaatcaaacatgtagcgagtgtcaattatgccgacgcagtaaaaagtcttcccatcgatgaagtgattggtgaaattattgatatccaacttagtaagagtgcaatttccatttttgacgtgagaagtgagcatgtttttaaacgaaataaaatcgctcgagggcatcacctatttgcccaagctaattccttagcaaccgcagtcatcccaaatgaactcgctttaaccacacaagcaaccgttcgctttgttcgttctgtatacgaaggtgaacgcatcatagcaaaagcaaaagtacgtccagcaacagacaacagagctattactatagtggatgtaaaaagctatgttggagacgaaattgtactcaaaggtaagtttgaaatgtatcacgcaacgcaaaaatgaaaataaaggactgacgtataatgaaaattgctgtagatgcgatgggtggagatcacgcaccaaaagaaattgttttaggtgtaatgaaagctgttgcccaatataaagatatcgaaattcttctttttggagacgaaacaaaaataaatgaacatttaacagataaaactcgtgtgaaaatcatacataccgatgaaaaaatagaaagtgacgatgaaccagttcgcgccgtaaaacggaagaaaaaagcttccatggtacttgcagcccaagccgtaaaagacggagaagcagatgcctgtatctcagcaggaaatacaggtgcccttatgtctactggactcttgtcattggacgcattaaagggatttaacgtccagcacttgcgccaacacttnncaaccgttactggaaaagggctttgtatgctcgacttagtgcgaatgccgaagcaaaacagaccatttattacagtttgccttatgggttcggtctatgcggaaaaagtacgtaaaatcgaacgcccacgtgtggcacttttaaacatcggaacagaagaacaaaaaggaaatgaattaacaaaanaatcatttgagctaatgaaaatcaagatgcctatgaatttatcggtaatatcgaagcacgtgatttgttaatggatgtagcagatgtagttgttactgacggattcactggtaatatggtacttaagtcaattgaaggaacaggtgcagctttcctaagtatgctaaaaatgagcttactaaatggctttaaaaataaagtcgcagcaagcttcctgaaaaaagatttaatggaactaaaagcaaaaatggactatagcgaatacggtggcgcttgtttattcggtgttcaagccccagttgtaaaagcacacggatcatctaatgcaaatgggatttttaccactattcgtcaagtacgtgaaatggttgaaaaacaagttgttgaaaccattaaatcagaagtagataaagtaaaagtaggaggaacagaaacaaatgactaaaatcgcattcgtatttcctggtcaaggagcacaaaaaattggcatggggcaagatgtagctgcagaatatccagaagcaaaaaaaatctatgatgatgctgatgaaagattaggcttttccatcacagatgttattacagaaggaccaatcgaattattaacgaaatccgaaaatgcacaaccagcattagtttcaacaagtgtagctattttacgcgcattagaaacatatggtgttaaagcggattacgtagcaggacatagccttggcgaatatagcgcgcttgttgctggcggatttttagaagcaagtgatgcgatttatcttgttcgtaaacgcggagaattaatggaagccgctgtaccaaatggtgccggcgcaatggctgcggttcttggcgtagaccgtgaaacattaaaaaaagtaaccgaagaagtaacagctgaaggggatgcagttcaacttgctaacctgaactgtccaggacaaatcgttatctctggaacaactgctggcgttgaaaaagcaggcgaaaaagcaaaagaaaatggtgcgaaacgcgtattaccacttgctgttagcggacctttccactcaagtttaatggaaccagctgcacttgctttccgtgatattttagcagaggttaaaatttctgatggtcaaattccagtagttaataacgtggatgctaaagaaactacggataaatccgaaattagcgataaactaatcaagcaaatttattccccagtattatgggaagatattgtcgaagaattaattaaaaacggcgtagatacttttgttgaaattggttctggaaaagtcttagctggtttaattaagaaaatcaatcgtgatgtaaccgtactgtccgcaggtgatgttgagtcagtgaaaagtgttgccgcgacattgaaaggagaataattaatgactttacaaggcaaagtagcagtagtaacaggtggatcgcgcggaatcggtcgtgacatcgccatcaaattagctaaagaaggcgcaaatattttcttcaattacaatggtagcccagaagctgcggaagaaacagcaaaactcgttgccgaacatggtgtagaagtagaagcaatgaaagcaaacgtagcgattgctgaagatgtggatgcatttttcaaacaagcaatcgagcgctttggtcgtatcgacattttagtcaataatgcgggaattacgcgtgataatttattaatgcgaatgaaagaagacgagtgggatgacgttattaacatcaacctaaaaggaactttcctttgtacaaaagcagtaagtcgtacaatgatgaaacaacgcgctggtaaaattatcaacatggcttctgttgttggcttaattggtaatgcgggtcaagcaaactatgttgcaagtaaagcaggcgtaattggtttaacaaaaacaactgctcgtgaacttgctccacgtggtattaacgttaatgctgttgctcctggtttcattacaacagaaatgacagacaaattagatgataaaacaaaagaagcaatgctagctcaaattccgcttggtgcttacggaacaaccgaagatattgcgaatgcagttcttttcttagcaagcgatgcatcgaagtatattactggccaaacactatccgttgatggcggaatggtaatgtaaaattggttaatgaatgcgaatttacttggctcgcattactttaaatatttttgtttacgtaggagaaataatcctatataatacttggagggaggtgaagtgaaaaatggcagaagtattagaaaaagttacaaaaatcatcgtagaccgtctaggtgtcgaggaatccaaagtaactttagaagcttccttcaaagaagatctaggtgcagattccctagatgttgttgaattagtaatggaacttgaagacgagttcggagttgaaatctctgatggcgacgctgaaaacattaacacagttggtgatgcagtgaagtacatagaggcaaacgcataaaactttatgtgaccggataaatgagggtgcccgtgttacttatctttgctgtggtaacttccgcacgtgagataagtagtacaggtagcctctttttcaaggttaagaagatttgttggttcattttctaagcagctttttgctagtggctgtttagaaaatgaacttgcttactagtatagagaggggcaagtgaaatgaatcaatgggaagaattacaagaaagtgttggttttgattttcaaaatgtggaattattacaacaagcattcacacattcctcatatgtcaatgaacatcgccgggaaaatgtgaaagataatgagcgcctagaatttcttggtgatgcagttcttgaactaactgtttcagactatctttttaataaatatccagatatggcagaaggacacatgacaaaaatgcgtgcagctattgtatgtgaaccttccttagtagagttcgcggaagcagtacatttctctaaatatgtgcgtctaggtaaaggagaagaaaaagcaggtgggagaacacgcccagctttacttgctgatgtatttgaatcttttatcggcgccctatatttagataatggtattgataaagttgtgaaatttctagaacgagttatttttccgaagattgatgcaggtgcatacttgcaaacagtcgattacaaaacacaactacaagagattgttcaacgggaccgtgatgtcttgatcgaatatgatattcttggcgaaacaggaccagcacacaataaagcattcgatgcccaagttattgttaacggacaagtacttggaaaaggcagcggtagaacaaaaaaacaagcagaacaaagtgcggcacaatttgctataaatcaactaacacatagataaacaaaaatggaggtgtccggacatgttattaaaacgattagaaatgaatggctttaaatcctttgctgacaaagttgcgatagatttcgtgcccggcatgactgcagttgtagggccaaatggtagcgggaaaagtaatattacagaagcaatccgctgggtacttggtgagcagtccgctaaatcgctccgtggtggccgaatgggcgacgttatttttgctggaagtgatacgcgtaaaccaattaattttgcagaagtatcgcttattctcgaaaatgaagaccattttttaccacttgattatagcgaagtagctgtaactagacgtatttaccgtaatggtgatagtgaatttttaatcaataaagaaaattgtcgactgaaagatattgtcgatttatttatggattctggacttgggagagagtctttttcgattatttcgcaagggaaaattgatgaaattctgaacagtaagccagaagaacgccgctcgatttttgaagaagcagccggcgtacttaaatacaaacatcgtaaaaaacaagctgaaaataaattatttgaaaccgaagaaaatttaaatcgtgtacaagatattttatatgaattagaagggcaactggagccgctcgaaatgcaagcttctattgccaaggattatttattccaacaagaagagctagaaaaatacgaagtgacgttacttgcgagtgaaatcagttctttaacagaaaaactagctgaagtccgtaaagagtttggtgaaaatcaaacggttttaattaagctacgcgaagaattacatgcggaagaagcaattgtttcccgtgaaaaacaagcgcttaatgaaactgatattgcgctagataatttacaagagcgtttgttagtagaaaccgaaaaactcgaacaactagaaggagagcggaatcttcaattagaacgtaaaaaacatagcagtgaaaatgaacaagtctacgcagaaacattggctgcaattacggaaaaaattactgctcttgaagaacaaagagaagtgttaagtagttcaaaactcgaaaaacaaacggcgcttgaaattgccgtaaaagcgaaaaaagaactagaagcgacactttcaaaatatgatgatttatccgaagaagcgattgaaaaccgtaaaagtgattatattgatttacgccatacacaaacgacaatcaataatgatttagggtatatcgaacgccaaatcggacaaattactagccgaattgataaattagatttagaaaatagtcaacatgtcgatgaaagaaaagatatgttagctcaaattgatacaacaaaaacgcaccttacaaaaatccaaagcgagctcacagaacaaatggaaatataccgtgaagtgcagcaaacattggcaaaacaagaagctgtttttggaacacaagaacgtgcgctttataaacattatgaaacagtccaacaaatgaaatcacggaaagaaacattagaagaattggcagatgattatgctggatttttccaaggtgtacgtgaagtattaaaagcaaaaaaagaaattcctggcatacacggagctttagtagaacttattgacataccagcaaaatatcaacaagcaatggaaacagcgctcggagcaagtgcgcaaaatgtcgttgttgaagatgaccgagttgctcgtgaagcaatcagctttttaaagaaaacgaaaagcggtcgcgcaacatttttaccactttcaactattcaacctcgagaattaccagcagcaactaaaaacgctttaagtaatcaaccagctttcatcgcacttgctagcgaagtgatttcatttgaccaaaaagtgtctccagtgattttaaacgcgctcggtacaacgattttagcgaaagatttaaaaggggcgaatacgctcgctcgtttagtaaacttcaggtatcgcattgtgacacttgaaggtgatgtggttaatgccggtggttcaatgactggtggagcaacaaaaggcggcaaatcgtctatcttaacgagaaaacacgaattaggtcaattagcagaaaaaatcgctgaattaaataattccactcgtgaactcgagtctgctgttcaagttgccaaagatagcatgtcgaaaaaacgagaagaacttgaagaaactcgtgttattggtgaaaatttacgtttacaagaaaaagaattgcttggtaaattagatcgcgaaaccgaaaatctagaacgttttaacaaacaattacagctatatgatattgaaaaagcagatggcagcgaagaattaaacaaactgctggaacgaaaagaaacgctacttcaagagcaagtagaaatcgctaaacaaatcgaaaaaaccgacgaagaaataaaagcgatgacatcttcaagtaaagcactagaaagtaaacgtacagcagatttagaaagcttgtcgtccttaaaagcgcaaattgccgctaaacgtgagcagttacagtctgccgtcgaagcagtagaccgcgtaacaacgacattacatgaaaactacgaacaaaaagaagcagctgagcaaaaactcgcttccttaaaaacaaatctttcaagtgttcatacaagtgaagaatctgctagaaaatccatcgaagaacttcgtaaagataaggccgaaacgagtgaaaaactaaatcaaacaagacaaactcgcaccgaactacaagaaaaaatcgaactactagaagctgagttgacgcaaaaaaataaccaaattagtttttatgtggaacaaaaaaataatgcggaaataagtattggtcgtcttgaagtagatattactaaccgaatcgatcgcttgcaagaagcctatttactaacaccagaacaagccgaagaaaaaatcttaccagaagtagatacggaacaagcacgttctaaagttcgtttattaaaacgttcgatagacgagctcggaatcgttaatattggcgctattgaagaatttgatcgcatccaagaacgctttgactttttaacaggacaacaagcggatttacttgccgcaaaagaaaccctctttaaagttatggacgaaatggatgaagaaatgaaaattcgtttcagtgagagttttgaagcaataaaaacagaatttgccattgttttcccagaattatttggcggaggaagtgcggaactcgtactacttgatccagagaatctactaacgacagggattgacatcgtcgttcaaccaccagggaaaaaactacaaaacttatcgcttcgttctggcggagagcgtgcattaactgcgattgcattactttttgctatcattcgtgttcgaccagtaccattctgtattttggatgaagtagaggcggccttagatgaagccaatgttacacgttttagccgctacttaaaacaatttgagtcaggcactcagtttatcgttattacgcaccgaaaaggaacaatggaagaagccgacgtactctacggtgtcacaatgcaagagtccggcgtctccaaattagtttcggttcgcttagaagaaacagccgaactcattaaataaaaggagtatataaaatgaccttttttaaaaaattaaaagataaaattacccagcaaaccgattctgtttcaggaaaatttaaagatggtttatcaaaaactcgcggtaacttttccgggaagatcaatgaaatggtcgctcgttatcgtaaagtagatgaagatttctttgaagaactagaagaaattcttatcggagcagatgtcggttttgaaacagtaatggaattagtcgatacacttcgccgtgaagtacaattaagaaatattagcgacccaaaagatgtacaagaagttattgttgaaaaactagttgatatttaccaaggcgacgaaaaagaagacgaaactttgcatattgaagaaaatggtctaactgttatcttatttgttggtgttaatggcgttggtaaaacaacctctatcggaaaaatggcacatcgttttaaacaagaaggtaaaaaagttatgcttgcggcgggagatacattccgagcaggtgcaatcgatcaactagaagtctggggcgaacgaacaggtgtcgatgttattaaacaagctgagggaagcgatcctgctgctgtcatgtttgatgccgttcaagccgccaaagctagaaaagcagacatcttactttgtgacacagccggccgtttgcaaaataaagtcaacctgatgaacgaacttgaaaaagtaaaacgtgtcattacgcgtgaaattcctaatgcgccgcacgaagttttactagtccttgatgctacaactggccaaaacgccttcgttcaagcaaaacaatttaaagaaacaacagacgtgacaggtattatcttaacaaaactcgacgggactgcaaaaggtggtatcgtcatagccatccgtaatgaactcgatattccagtaaaattcgtcggactcggggaacaaatggacgatctgcaagcctttgatgcaaatgaatatgtgtatggcttatttgctgatatggttgataacgaaaaataatcagagaaagccgaatgatgctcgtcattccggcttttttctcttttatttaaccttccttgacattcccgtgatttccccgtatcctttaaaaggagagaggtgaaatgccttgtttgagaagacaaaccgtatgaatttattatttgatttttaccaagaattactaacaacaaaacaaaaatcgtatgtttctttttattacttggatgattactcactaggcgaaattgccgaagaatttgaagtgagtagacaagctatttatgataatattaaaagaacagaagaaagcctagaaaaatacgaagaaaaactagggatgttaagaaaatatcaacaacgagaaaaactctttgatcaattagaagcacaattaaccaagaagaattttctggacgagcaagtgaaagatacgctcgaacagcttaaaaatatcgattaggaggccagaatcatggcatttgaaggactagctggaagactccaagaaacaatgaacaaaattcgcggtaaagggaaagtaaacgaagctgacgtaaaagaaatgatgcgtgaagttcgtcttgctttactagaagccgatgttaactttaaagtcgttaaacaatttattaaaacagtaagcgaacgtgcagttggcgcggacgtaatgaaaagcctaacacccggtcaacaagtaattaaaatcgttcaagaagaattaacaagcctcatgggcggcgaagaaagtaaaatcggaacagctgatcgcccgccaaccgttattatgatggtaggtttacaaggagctggtaaaacaaccacttcaggaaaactcgctaatttattacgtaaaaaatataatcgtaaacctttactagtcgcagcagatatttaccgacctgcagcaatcaaacaattagaaacacttggcaaacaattagatatgccagtattttctctaggcgatcaagtaagcccagtagaaatcgcgaaacaagctatcgctaaagcaaaagaagaacatttagattatgtcattatcgatacagctggtcgtcttcatatcgacgaaactctgatggacgaattaaaacaagtgaaagaaatcgctacgccaactgaaattttacttgtagttgattcaatgactgggcaagacgcagtaaatgtggcccaaagcttcaacgaacaattagaaattaccggcgttgtattaacaaaattagacggtgatacacgtggtggggcagcactttccatccgttcagtcacaggaaaaccaatcaaattcgttgctaccggtgaaaaaatggaagcaatcgaaacgttccatcccgatcgtatggcttcaagaattctcggcatgggtgatgtactttctcttattgaaaaagcacaaactgatgtagatgcagaaaaaatgaaagctatggaacaaaaaatgaaagacaacagcatgaccttagatgacttcttggaccaattgcaacaagtaaaacaaatgggaccactagatgaactactaaaaatgatgccaggggcaaacaaaatgaaaggcctcgacaacatgcaagtagatgataaacaactcggtcacatcgaagcgataattaaatccatgaccaaaaacgaaaaagataatccggacatcatcaatgcgagcagaagaaaacgaattgctcgtggaagcggacgcccaattcaagaaatcaatcgcctcctaaaacaatttgctgaaatgaaaaaaatgatgaagcaaatgactggtggaggaaaaggtaagaaaggtaaaaatccattcggcaatttcaaaatgccattttaattcaaaaagccaaaaccctaatgcggttttggcttttttcataccttaacatcctgcaaatcatttctttacaaaccctttattcaaccaataaaatccattgttataattacaattaagcttacaaaaggaggagaaagaatgagaaattgggtaaaagtaacaggagcaggtgtattaagcgcaacattattactagggggatgtggaactcagtcagaagaaaaagcagaagcgaatgttaaaaccgaaaaaacactccaaccaggtagtcaaataaaattacaaggggcagtaaacgttcgtgacttaggtggttacaaaacaacagatggtttaacaatcaaaccacataaattaatcagaagcgccgaacttgccactttaagtgattcagataaaaagaaactcgtaaatacatatgacctttcgcatatagttgattttaggacaaataccgaagtgaaagccaaaccagatccagaacttaccggagtcgattatacacatgattctgtgatgaaagataacggagcatccacgagcacgcaagatttaaccgccagtctagctaaaatggataatcccgaaacctttctaattaatgctaataaaagctttgttacagatgaaacttctattcaagcctacaaagaattttttgagatactactagcgaatcaagatggctcagttctttggcattgtacagccggaaaagaccgagctggatttggaactgctttagtcctctcggcactaggtgtagataaaaacactgtaatagacgattatatgttatccaataaataccgtgctagtgaaaatgaaaaagcaatccaagcagtcgcagctaaaacagataataaaaaagttatcgacgggatgacagctgtaatggaagttcgtgaatcttatatcaatgccgctttcgatgaaattgatgctaaatatggttcgatggataactttttaaaagaaaaactcggactaactgatgataaaaaagagcaacttaaaaaagcatatctttactaaaaaaaaatggccctttcaaagagggctattttttttgcgtacaaatagatttaaagtgaggaaccattttaaaaagatttgtatacaatttaaagacaattcatgtaaagttggatttagtagatatatttacctattaaagaccagtgctaaagtttaaatataagccttaaatgcgcatatttgtataacttttagactaatgatattgaattgaagtattttttctttctagtactttttactttaatttttaaaaatatactatatagtaaagttatctaactggttataacattaaatgaaaggttcacttagatacataaaaagaaaggaggggcattttgctgaaatgattttaatctgatattggataaaggttcatgggatacttaatagttagcttattagtaaacaataattaaatacctttattctgttttcagttatttttcaaaatcaaaacttattgatttttaagggggaaaaatgatgaaaaaacagcgtgtggattacaaaaggaaacttgaccaaaagcgagcgcaaaaagcaaaattaattgctgctctaattacaacaacaacaatgatggtagcacctgtcacagtgaattatgattcttttaatcacaaatttgccctcagtggtattcaagcggatgcagcaacgattgatttacttgggaattcaagcttgaatacacaatatgcgaatgggaaattagtgattactctatcagggaaccaattagttagtgcgagtgctgtgtctacgtattacccgtattttgaactgcctagcgaattaacttctattttgagtaatccaaatataaaagcaaatacaaaaattgattataaaattgcttatttaggaattgggaatattgggttatttaatcaaggaacagttaatggtagttcaaataatttcttcattgatactagtagaaatgcaattggggcaagagtaaatcatttactgggagttggcgttagtagtgtatctacttttacgctaacaattgatttactagcgctcggtgttacggctcttcctagtgcaaatgatggaaaattggatttcgcagctagaactggcgatggactattggatgttgatttgttgaatagtaacgcagctcgtggatttattacgacggatgttggggatgcggatgctgacgccgatgctgacgccgatgcggatgctgatgccgacgctgatgccgacgccgacgctgatgcggatgcggatgccgatgcggatgcggatgcggatgctgacgccgatgcggatgcggatgctgacgccgatgcggatgcggatgcggatgcggatgccgacgccgatgcggatgcggatgctgacgccgacgcagatgccgacgccgatgcggatgctgacgctgatgcggatgcggatgccgacgccgatgctgacgccgatgcggatgccgatgctgacgctgacgctgacgccgatgcggatgccgatgctgacgctgacgccgatgcggatgcggatgctgacgccgatgcggatgctgacgccgatgcggatgctgatgccgacgctgacgccgatgctgacgccgatgcagatgcggatgcggatgccgatgcagatgcggatgctgatgccgacgcggatgctgacgctgacgccgatgcagatgccgatgcggatgccgatgcggatgctgacgccgatgcggatgctgatgctgacgccgatgcggatgctgacgccgatgcagatgcggatgccgacgccgatgcggatgcggatgcggatgcggatgctgacgccgatgccgatgctgacgctgatgccgacgccgatgcagatgcggatgcggatgctgatgccgacgctgatgcggatgctgacgctgatgccgacgccgacgctgatgcggatgcggatgcggatgcggatgctgacgctgatgccgatgctgacgctgatgcggatgccgatgcggatgcggatgctgacgccgacgctgatgcggatgctgacgccgatgccgacgccgatgccgatgctgacgccgatgccgatgcggatgcggatgccgacgctgatgcggatgccgacgctgatgctgatgctgacgccgatgccgacgctgatgcggatgcggatgcggatgccgacgctgatgcggatgctgacgccgacgctgatgccgatgcagatgccgatgcagatgccgacgctgacgccgacgctgatgcggatgctgacgctgatgcggatgcagatgcggatgccgacgctgatgccgacgctgatgccgatgcagatgccgatgcagatgccgacgctgacgccgacgctgatgctgacgccgatgcggacgcggatgcagatgccgatgccgatgccgatgccgacgctgatgccgatgccgacgtagatatcgactggagagatttcctagttgaaaaaccaactgtcaatccaatttatgaaggaactaaaactattacaggttcttctatctataaaaaccttaatatgaataccctattaaaatcattacaaagagatgctccagccggaacagttttctatattaatttaacgcttccggatggcacagtcattggcaatgtattaattaattcagatggaacctatacaataaatattcctaattataatttgaaagctggagatgttatccaccttcaagtaactgctaaatatggtgacgaagtaaaaacaagtgatgatgtagcagtaacagttcaaccattagttgattcggatgctgacgctgatgccgatgctgacgcagatgctgacgccgacgccgatgcagatgccgatgctgacgccgatgcagatgccgatgctgacgctgattcagatggaggaggtactaactcttctaataacggtggaactactggaacagcaaatggaggtacgggcgtaaccgtttctaatatgagtacaaacggctccggaacaatgctttcctcaggctacagtgctgatggaactacaagtatttccgcaagcgaccttccatccacaggggatactagtagcagtcttccttgggtaggacttggactcttctcattagctggcgcgttcttactacgtcttttccgtaaataaagccacaaaacattgattccctgctgctaagttagttttagcggcagggaaattataaaaaggagtggtacatatgccttggagaggtgtacttgatgaacttgaaaataaaattattgatcaattaacagaagcagaagagcacgccacttacaacgggaaatggcatggttttctaacaataggttataaaaataaacgagcgacagtaatcaactttagctatctttgtttagcaaatttaattaatgaaatgaaaaaaagtgcattgaaaaatcaaaccgaagaagcaatttcatttaaaatggatattgcggtgaattatcaactcgaaaacttaggggaatggaatagaaaagctttaaaaacaaagaaaaattattatagacgaggcattgccttaaatgaaaattttaaaatagctttaatggaacaggaaattaatgcgaacgctatccttttacctggagatgaaggactagctatcaacgttgaaaatatgaatagatatttaattcaagccaataaaaatcaagcccaattaaacttaaccatcgattctagtgttgtcactttcgaaacagtagggtggttttttgatggaaagaacattcatgaattagaaacagctagtttagaccacggacgtaggaaagtagaatatttgacgccagaaattatttctacattagttgaaaatgctggagaatatttggcgcatcaagtaaacacaactggggaatttaactatggttggtttgcttgttttgacaaaaaaatcaaacattataatagtttgcgccatgctagtactacttattccatgttagaagcatatgaattaacgggaaataaagctattttagaagccgcaacaaaagctttaacataccttgaaaaacactttatttatgaaaaagacgacatggcctttcttatcgaaccagaactccgtgaagtaaaattaggtggttcagccgcgactctactagctttaactaaatatatgcatattactggcactaaaacatacttacctctttgccgaaaaatagcaaatgcaattctctcattacaagacgaaaatggaaagttcacacatgtgttagaatatccatcattagaagtaaaagatatttttcgaattatttattatgacggggaagctgtctttggcctacttcgcctgtatgaaattgaccgcgattccaaatggttagacgcagcagccaaatcttttaatcactttatacaagataaatactggcaaaatcacgatcactggttaagctactgcgccaatgaaattaccaaatatatcaaagacgaagcttactacgaatttggactgcaaaatgcctttgacaacttaccatttatttacgagcgcgaaaccacttttccaacatttttagagcttaccgttgctacaaaagaaatgacactgcggatggaagcggaaggacaacaagcattattaacatcttattcgcttgaaaatcttgaaaaaacaattacaaaacgcgcactttatcaattaaatggttacttttatccagagcttgcgatgtactacaaaaatccagccagaatagaaggtagtttcttcattcgtcaccagtctttccgcgtgagaattgatgatgttgagcataatatttccggatatgtgagatattatcaactattaaaacaaggaaaactaagcactgaagccgaaagtgtccgctgaaaagaaaaaaatatcctctgtaaagaaaaaacactttacaaacaaatcctttactggtaatatatatacttgtgtaagactttatggaggtgtaattaaactatggcagttaaaattcgtttaaaacgtatgggttctaaaaagaaacctttctaccgtattgtagtcgctgattctcgtttcccacgtgatggccgttcaatcgaaactattggtacttataatccattacttgatccggttgaagtgaaaatcgacgaagaagcaactttgaaatggatgcataatggtgcgaaaccatctgatacagttcgcaatcttcttagccgcgaaggtatcatggaaaaattccataaccaaaaattaggtaaataaggaggtctcggcgcgaatggaagaactcattctctcaatcgtgaaaccccttgttgaccacccggaagacgttgttatcacgccagaagaaacggatacttcgttaacctacaaattgtctgtcagtaaagaagacatgggacgcgtgattggtaagcaaggtcgtattgcaaaagcgattcgtactcttgtctatgcagttggctccaaaaacgataagaagattcgtcttgaaattatcgaataacaaaaactcgtcaaattggcgagtttttttataactttttttaataatcatcagagaagcaattacctcactaaatgttgtaaaataaaatagaaatggaggaattgttatgaagccagttattggaattacaggaaatagattagtaaaaggagtggacgtgttttacggacaccgtgtaacttatacacaacagcgatatgtagatgctattcagaaagttggcggatttcctatcgcgttaccaatagatgacccgtctactgccgttcaagcaatttctctcgtagatggtttacttttaaccggtggacaagatattacaccgcaattatatttagaagaaccgtcccaagaaatcggggcatattttccaccgcgcgatagctatgaaatcgccttagtccgagcagctttggacgctggaaaacctatttttgcgatttgccgcggaatgcaacttgtcaatgttgcactaggcggcacgctgtatcaggatattagccaagttgaaacgaaagcactccaacatctgcaacgagtcgatgagcaactcggctcccatacaatcgatattgaacctacaagcgaactcgcaaaacaccacccaaataaaaaactagttaactcactccatcaccaatttatcaaaaaattagcaccgagttttaaagtaacggcccggactgctgacgggatgattgaagcagtggagggtgacaatttaccaagctggtatttaggtgttcagtggcacccggaattaatgttccaaacagatccagaaagtgaacaattattccaagctttagtagatgaatccaaaaaaactatggtaaaataaggacataatcgctagtggaggtgtcctgtggaaatcatccaaaaagttgtcgtcaaacaaattctgacagaaacaagtaaacaagaattaatcgagtattataccgaacaaaaacgacaaattgaacaagaatgcgatcagttgcattttgaacaaaagaaaatggaacgaaaaagcaaatttcaaccagaacgagtggctgactatttcacgcatgaacttgaagtacgccgagaaaagaaaaaattaatccagtttcaaatggaacaattagaagtacttgaacttggtagtgaaattcgcgaacgagaaatggaaacaatcattgatgtacaagtaggagacaagtgggataaatccattttcgataaaacaatcgttgtgagagatggaatcatagtagaaatacgctagaggtgacttatggagaaaatgtataatgtaggaaaaattgttaatacgcatggcttaatcggtgaaattcgtgttatcgcgacgaccgattttccagaagaacggttccaagttgggaataccgtgtacttatttgaaaaaaacagcaaaaagcctgaaaaactaattattcgttcacaccgcaaacacaaaaactttgatttgcttatgtttgaaggacttaccggcattcatcaagtagagcgtatgaaagaaggcgttcttaaaatcaaagaagcgcaactaaccgatttagaagaaaatgaattttatttccatgaaatcattggttgcacagttgtgacgactgacggagaagagcttggcgaaatcacagaaattctaacaccaggcgcaaatgatgtatgggttgtaaaaggcgcagacaaaaaagaaaaactcatcccttatattgccgatgtagttaaagatattaatactaacgataaaaaaattaccattgaagtaatggaagggctgctagattaatgaaaatcgacattctatccatttttccagatatgttttcgggagtgactgggagttccattattaaaaaagcaatcgaaaatgagcgggtcgcggttgaagtaactgatttcagggaatatgcagaaggaaagcatcaggttgtcgatgattatccttatggtggtggggcagggatgctccttaaagcccaaccaatctttgatgccgttcaagcggtcaaagataaacaaccagaaacaaagccaagagttattttaatggatccagccggtaaacgcttcgaccaaaaaatggcagaagaatttgcagaagaagaacatcttgtttttatttgtggtcactacgaaggatacgatgagcgaattcgcgaacaccttgttacagatgaagtttcgataggggattatattttaacaggtggcgaaattggtgcaatgattgtgatggacagcgttattcgccttttaccaggtgtacttggaaataaagattcagctgtgacggattctttctccaccggtttacttgaacatccacactacacacggccagccgattttcgcggaatgaaagtacctgatattttactcagcggaaaccatgcttggatagaagagtggcgcgataaagaatcactcaaaagaacctacgaacgccgaccagatttacttaaaaactatccattaacagacaagcaaaaaacttggctcaaagaatggtctgacagtaaataaaaaaggacgtgattttaaatggcaatcttcggaactccagatgaaaaagaagctaaaaaatccgaacgacaaaaagaacgagaagcctatgtgcaagaagaaaacgaccaaaagcgaataggtcaaagatggcaggatattcaggtctcaacaggaccaataaatgttaatcatgatattctaaccgttgttttcgccaaaagcgttcgcccaagaattaaaagtgatccagaagcgtacttagaaacagtaggctttgaaaatttactacaggaattgcaaaagaaagctttagatgcaggcggaaatggcttaattcattgttcattcactgagcaattcgtcgacgggcttgtatatcaactggcatatggaacagccgtgaacattaaaattacgagattctaaaaaaagactagaaagctgggtaactggttttctagtcttttttatttgttagttgggcttttgcacgctgaatgattcttaataaatcaaaatcactcatggatttaacaggtccgtgaccacaagcgatttcagtcacatctaccagctgcaacttttccgcggaagcaatactcgtttctaagtcccaagatcccatcgcaggaaaaggaaacaaaatccgtttctccccacaaatagctgcaccaccacgagtttgaaataaatcaccaacgaataaatgcccattacgctcatcaaaaaaagaaatcgagccaggtgtatgtccgggtgtatccataattaataatgaacctaccatatcaccatcttttaatagttgatcaatttttactggaaattgatcaggataactaccctttaacggtttttgagcttcaaaagcataaatctcttttgtttctaccagcaatttttccctgcttccaaccatcaaaagggcttctggaaaagcttctttaagtgcaactaaaccgccaatatggtccccatgcccatgtgtcaacaaaattcgttttaaaggtaatttcagtttagtaataagtgaaattattccttttgcatgagataaaatccctgtatcaattaaagttaaaccatctttctccaaaactaagtaacaatttaccggaaaaaggtgcggcaatgttgttatttgccaatattgatgtttagcagtaactttcattccaaatccttctttctatattacttttttaataaaaaatgtaaatcttttttagctgctcgagcaatttttttatcatagtattcatttgattttctaatggaaagatcaagccggtcaattgaagtagctctaacagaaaggacgccactcatccaaagtggatagcggagggcggtaagagcaggacgagcgaacagccgatgttgtaactccatcccgccaatcgtataaattaagcgcgctcgtttttttcgccaaggaccggtcagtaaatattttttatctttaaaactataactctcgccgcgccaaaacaaatgatcaattacaccttttagtacagctggaacattaaaccaccagacgagataagcaaatagcagcaaatcagccgaactggcatcttgttttaagttggtcatttcggtagtttgttcagttcggtagccctcaggtaaatttggatcaaaagccaattcgcgaatatcatacgtttttatctcgattgctgagtgtccttgaaaaaaagttaaatacttatgaaacagttctcttgatgttccttttctcgcgggtcacccattattgctacaacttttgccattanaatccgtccttcctgatgtcagtgaaaatatgttccacaaaggtatttacatctttttgaacagtcgaatagtcttgtacatcatcgatttgaggtaattcttctaaaagggcggcgattttcgtatagtgtgcaatagtttgtttaatctctgctgctttaagggcaagcaattctttcgacgccgtattacacgcaacagatggctcgcttcttaaccattccatcattaattttatttcggcaagggagaatctggcatacttcatcaccaaaataaactttaattctagtaaatgttgagcgttataaacacgatacccgttttccagccgattaggtactattatcttatttttttcataatatcgtagtgtgtctgcccgaattccaacgcaagcagccatttcttttactgtccattgttccatgttcgacacctccatttgatatacttaaggtaacattagaccatactccaaggtcaagttttttattaaagaaaaagtaagaaaaaaactttacagcgaatctagtttatggtaacctaaataaggtggctggagagaccagtctgataacgatattccgcttcattattaatatgaatgaatgtttgttggaaggagagaaaaacatgaacaaactgattgatgaaatcacaaaaagtcaactaaacccagatgttccaagtttccgtccgggtgatactgtacgtgtacatgcgaaggtagtcgaaggtactcgcgaacgtatccaattattcgaaggcgttgtaatcaaacgtcgcggagctggaatcagcgaaactttcactgttcgtaaaatttctaacggtgttggtgtggaacgtactttcccagtacatactccacgtatcgcgaaattagaagttatccgtcgtggtaaagtacgtcgtgcgaaactttactacctacgtaacctacgtggtaaagcggctcgtattaaagaaattcgttaatcatttaacggctgaaacccttgagaaatcaagggtttttgttttactaattattagacatacaaccaaatgaatattaactacagattaggagaactatgatgcttagattttctggattagtaataacaatcgctttaattatatatattgtctttttcttatggagatggttgaaaaaacacgataccaaaaaaacaattttcttcaaaacttgtttttatgtgtatacgtgtggagtaatcaagtttacgatgtttcctattatgctagattcttttctaattgaggatacaaaaaaatatgcaactggttcctatatgaatttaataccatttaattccataggcgaaatgtttatggaagggagagaatatgctagtttccaaatagtcgcaaattttattatgtttgttcccctcggaatacttttaccattatgttttccaaaattaacatggaaaagtgttttcgctataagttttatagcaaccgttgggattgaatttgcccagttattacaagaccttatttatcaagcgccttttaaatttgtagacattgatgatgtaatattgaacttttctggcgggattttcggctacatagtttatgttataattcgacctttattaagaaaaatgaatttatgcccaattgtagaaaaaaacagctagtatataatcctagctgtttttttcgatttatttactgaaggttataagatttttcgattagtgtcactggttctccttggctgtttctaagtgcgatattttcttttccccactgacacattgtatcaactatagcatttaaagtaagcccgtaagcagttatactatactcgactttaggtggaagctcattatacaccgtacgatcaataatcccatctctctctaattcccttagttgctgaactagaaccttctgtgatattttcggaatacatctttgcagctcgccagtccgcttagtcccttgaacaagaaaacaaataatcaagggtttccattttccacccataatatcgagtgtagcttctacacctaaattataaactttcatttgttttcctcatccgatttagatacttgcaaataataccacttatagacacttacttacaagtaactaagccactttcgagtgtgtatttactttctttcaaaactaaattacgataaataataacgatagaataaaggagtaatcgaatgaaaacattagttattatcgcacatccgaatatcgaaaattcacgcgtaaatagagtatggaaagaagctcttttaaaaagtacagaagagttggcaattcatgaattatatgaagtttatcctaactgggatattgatgtagcctttgaacaacaacaattgcaaaactacgataaagtcattatccaatttccattttattggtacagctacccgccgttattaaaaaaatggttcgatgatgtcttttcgtatggctgggcttacggctcaaaaggggacaagatggctgggaaaaagcttgctcttgcagtttcaattggcgataaaaaatataattataaagaagatgcaccaattgactattcactcgatacattactcacaccatttcgagcaacaataaaccacattcgagctgactatagaggggctcacacgatatatggcagctcctttgaagtcacagatgaagaaatagtagaaaatgcgtatgtgtatgcaaacaagtttattaaaacgttaaattagctttctgagtatatttctaataattcaccttgacaccaaaaatcccatatgatatagtaagtaaggttattaaacaagaaagaagaagcaacccgcttctcgcctcgttaacacgaacgttttcaggcaaaaaattcaaactttcgtcgcgtaacttacgcgattttgaatgtgcgggattgctgaaaagcagcccgtttttttatggcctctgaacgaacgagttagcaggccgcagatttgaacagctattttctatcttgttgtaacaaaattaagtggaggtggctcaccattagcaaagacatgttggtaaacgatgggattcgtgcacgtgaagtaagattgatcgaccaagacggtgaacaattaggcgtgaagagtaaaatcgatgcgcttcaaattgctgaaaaggctaatcttgatctagtgcttgttgctccaacagcgaaaccgccagtagctcgtattatggactacggtaaattccgttttgaacaacagaagaaagataaagaagcccgtaagaaccaaaaagtcatcgtaatgaaggaagttcgtttaagtccaacaattgacgaacatgattttgatacgaagctacgtaatgcacgtaaattccttgaaaaaggcgataaagtaaaatgctctatccgttttaaaggtcgtgccattacacacaaagaaatcggtcagaaggtgcttgaccgttttgcaaaagcgtgcgaagacctttgtacaattgagcaaagaccaaaaatggacggacgttccatgttcttagtcctagcaccacttcatgaaaagtaaagttttgaggaggaaatattcatgccaaaaatgaaaacccaccgcggttccgctaaacgtttcaagagaacaggatctggaaaattaaaacgcagacacggtttcacaagccatatgttcgctaacaaatcccaaaaacaaaaacgtaaattgcgtaaatcagcaatggtatcagctggcgacttcaaacgtattcgtcaaatggtcgctaaaatgaaataagagaaacaacatttttgtaaattctaggaggtagacaatatgccacgcgtaaaaggcggaacagtaacacgcaaacgtcgtaaaaagatagttaaattagccaaagggtattacggctctaaacatttattattcaaagtagctaaccaagcggtaatgaaatcttaccaatatgcttatagagatcgtcgtcaaaagaaacgtgatttccgtagattatggatcgcacgtatcaatgcggcagctcgtatgcaagatctttcttacagcaaattaatgcacggcttaaaattagctggtattgatattaaccgtaaaatgcttgcagacttagcagtaaatgatattgcttcatttaacacacttgctgattcagcaaaaaaagcattagctaaataattcaaaaatcctcactccaacaagtgaggatttttttatgttataaattaagttctagctcaactggacaatgatccgaaccaagcacatccgcatgaattttcgcatccactaacttatctttcaaacgttccgaaacaacaaaataatcaatccgccaaccagtgttcctagcacgcgcgttcattcgataagaccaccaagaataagcgtcggtcaaatcaggataaaaataacggaaactatcaataaaaccagcgtctaaaaacgcagaaaattttgcgcgttcctcgtccgagaatccggcatttttgcgatttgtcttcggatttttcaaatcaatttcttcgtgcgcaacattcaaatcaccacaaagcacaaccggcttcgttttatccaagtttttgacatattctaaaatcgcatcctcaaacgtcatacgataatctaatcgttttaactcagcttgcgaatttggtgtataaaccgttaccatataaaaatcttcaaattcaagcgtgattacgcgaccttcagtatcatgttccgggacacctaaaccatattgcaccgataatggctcaacttttgtaaaaatggcagtacctgaataacctttttttacggcataattccaataatctttatacgcaggtaaatcaagttcaatttgaccttcttgtaattttgtttcttgtaagcaaaatatatcagcatcaacttcttcaaaatactccaaaaaaccttttttcacagctgcacgaagcccgtttacattccaagaaattaatttcatccaaaaacctcccatctctaatagaactattataacgtaagtaacatgctataatgtagttaaacgattgggagggactagaatggaaaaatacgttgctttactaagagccgtaaatgtcgcagggaaaaataaagtgaacatgaaaaatttaaaagcagccttacaagaagagggattccaaaatgtaacaacctatatccaaagcggcaacctcgttctaagttctaatttacagacagaaaccgaagtagcagcaaaaataacagaagtaattttagcgagcttcaatttatccatcgatgtattcgttttttcagaacaaaactacaaaacaatcatcaaaaacaacccatttccaccagaaataattggtgaagaagaacgttggatgattgctttttacaatgaaaatattgatattcctaaacaaaaaaatactcaagccgaagtaatcgcaatcggccgagcgttatatatccacgttttctcaaaccaaatccatcaattaaaattgcctgtttttctcggagaatataaaaaaacactaacgacaacgcgaaactggcgaacaaccgctaaattactaacactactcgacagtcaggaatagaattttttgaaaatcaagtttataatgaaaaagaatcaatctgagggagtgatagaaatgaaagaagaactattaaaacgatttacaaaatatgtaaaagtagatacacagtcaaatgaagaaagcacagtttgtccaacaacgccaggacaaatggaactagcgaacattctcgttacagaactaaaagaaatcggtatgcaagaagtaacagtagatgaattcggttatgtaatggcaacacttccttctaatacaacgaaagaagtaccagttatcgggtttttagctcatttagacactgccactgacttaactggaaaaaatgtaaacccacaagtgcatgaaaactatgatggtaaagacatcgttctaaataaagacctaaatgtcgtactgtcacctaaacaatttccagaactagctaattacaaaggaaaaacgcttattacaacagacggaacaacattgcttggcgcggatgataaagcaggaattacagaaattatggtggcaatgaattatttaatcaatcaccccgaaatcaagcatggtaaaattcgcgtagcttttacacccgatgaagaaatcggccgaggaccagagcgttttgacgtagaagcatttggtgccaaatatgcctacacaatggacggtgggccacttggcgaactagaatatgaaagctttaatgcagctggtgcgaaacttacttttaacggaaatagtgtgcatccaggaacagccaaaaataaaatgattaatgctgtcaaaatggcaatggaattcgatgccgagattccaaaagaagaagcccctgaatatacagatggctatgaaggcttttatcatttaatctcattaaacggtgatgtggaacaagccaaatcttactatatcattcgcgattttgatcatctgaaatttgtagaaagaaaaactcatatcgcaagtatcgccgaaaaactagcagaaaaatatggggaaggttcagtagaattaaaactgaatgatcaatattacaacatgcgcgaaaaaattgaaccagtaaaagaaattgtagacatagtgagtgcagcaatgagaaatctagatatagaaccaaaaataagcccaattcgcggtgggacagacggagctcaactttcatacaaaggactaccaacaccaaacatctttggcggcggcgaaaatttccacggtaagtttgaatacgtcgcgttagaaagcatggtgaaagcaaccgaagtaatcattgaagtagcgcgtttatttgaagaaaaagaataatttaaaaagggagtctaatttagttagactcccttttttatatgttcatttactttagctgcaaacacttttgcttctccatttgcaacgagcaatgtatatttttcgctatttttaagatgtaatatcaatttttttgtcatcgagataatacttactttttgctctaatagttctatgtcttcatatgcgaatttcttaagtaagtaaacatcttcattttctaagtaaaaaataaaaacatcttcatttgaaatccaaagtcctgttagatccattaattcgccttccactacataagaaaacgaaccatagatcaggctagtatccataccaagaagctcacgtgcgcctgcttttgcaatcatagttttatacaaactgtttcgccccttttacatacgcgttattcgtaaccttactataccacttacttcggataaaccgcaatcgcaccatctttaatacgaattaactcgacaggcttttgataaaacgcttgaagcacttcctctgtcaaaagtttttctgttttcccgtgatgagttatttccccgtcacgtagtaaaatgatattatcaaagcaggggagaatttcttctgtatgatgcgtgacaaaaagcattgtcggtgaatcaggacgttcagcaatttttttaatccgttctaataaacgacttttcgcaaataaatcaagtccgttacaaggttcatctaaaatcagtaacttaggatttgccatcaaagcacgagcaattaaaacaatttgtcgttctccttgtgacaagattttataagctttaccaataagcgaggccccaccacaattagtcagcagttttttcgcttggtttacctcaacatctgtcactttcgcatacattccaatacttgcaaacttaccactaagcacaatttgctcacttagctcgtaatctttcagctgatgatctaaagcattactcacccaaccaattgatttacgtaattcaggtaaagaagtctgtccaaaaacatgcccaagcacttgaagctttccactactaggccaaagatacccatttagaagctgcagcaaagtagttttcccagagccatttagcccaagaatagcccagttttccttttcgttaacggtccaattaatatccgataagatagttttattttcacgctttaaataaacatgttcaaatgcaaacatcgaataccccatttccattttctaccattgtacatgaaaaataacataaaaaggagtaaaaaaaatgaataaagaagaaattattctttcagcaaagaattggatgcactctcattttgaaaatgaaacgaccggccatgactggtctcatataaaaagagtatggaaattaagtaaagaaatccaatcaaaagaaggtggcgacctgttcactatagaattagccgctctattccacgattactcagatattaaactaacaaccgacgaacaggaagcaactaaaacactaatcaattggatggaaaccaaagaaataccatcagaactaatcaaaaaaatcatccgaatcatccaatcagtttcatttaaaaaaggaaaaaatacttttaaagcattaacaatagaagaaaaaatagttcaagacgcagatcgcttagatgccatcggagcaatcggcatagcaagaaccttcacttatggtggcgctcataatcgagaaatagctaaccagaacaatccaaaaaacaccacattacaacacttttacgacaaacttctccttataaaagatcaattaaacactgaaacagccaaaactatagcaaaagaaaaacaaaaaattatgcaggattttatacaagcattagaaaaagaattaaaagtataattaaaaacacttgtatttatagaaaaggtattatataataataaagctgaattgatacgaaataattcatcaaaaactatttaaaaattagttgttgacgcgatataaactttatggtaagatttaaaagttgcgttaacaaagcaactgacctttgaaaactgaacaaagaagaagacgaaaagcaatgagacgtaaagtctcactggtaatcgcagggcagaaaacagaaagctgttttcaacaaaaacaaactagtaatttaattgctagcgaagtcaatttgacgcaaggaatcttattcacggtgttgaataagtattcaaattcaatttatattttaaagagagtttgatcctggctcaggacgaacgctggcggcgtgcctaatacatgcaagtcgaacgaacggaggaagagcttgctcttccaaagttagtggcggacgggtgagtaacacgtgggcaacctgcctgtaagttggggataactccgggaaaccggggctaataccgaatgatagagtgtggcgcatgccacgctcttgaaagatggtttcggctatcgcttacagatgggcccgcggtgcattagctagttggtagggtaatggcctaccaaggcaacgatgcatagccgacctgagagggtgatcggccacactgggactgagacacggcccagactcctacgggaggcagcagtagggaatcttccgcaatggacgaaagtctgacggagcaacgccgcgtgtatgaagaaggttttcggatcgtaaagtactgttgttagagaagaacaaggataagagtaactgcttgtcccttgacggtatctaaccagaaagccacggctaactacgtgccagcagccgcggtaatacgtaggtggcaagcgttgtccggatttattgggcgtaaagcgcgcgcaggcggtcttttaagtctgatgtgaaagcccccggcttaaccggggagggtcattggaaactggaagactggagtgcagaagaggagagtggaattccacgtgtagcggtgaaatgcgtagatatgtggaggaacaccagtggcgaaggcgactctctggtctgtaactgacgctgaggcgcgaaagcgtggggagcaaacaggattagataccctggtagtccacgccgtaaacgatgagtgctaagtgttagggggtttccgccccttagtgctgcagctaacgcattaagcactccgcctggggagtacgaccgcaaggttgaaactcaaaggaattgacgggggcccgcacaagcggtggagcatgtggtttaattcgaagcaacgcgaagaaccttaccaggtcttgacatcctttgaccactctggagacagagctttcccttcggggacaaagtgacaggtggtgcatggttgtcgtcagctcgtgtcgtgagatgttgggttaagtcccgcaacgagcgcaacccttgattttagttgccagcatttagttgggcactctaaagtgactgccggtgcaagccggaggaaggtggggatgacgtcaaatcatcatgccccttatgacctgggctacacacgtgctacaatggatggtacaaagggtcgcgaagccgcgaggtggagccaatcccataaaaccattctcagttcggattgtaggctgcaactcgcctacatgaagccggaatcgctagtaatcgtggatcagcatgccacggtgaatacgttcccgggccttgtacacaccgcccgtcacaccacgagagtttgtaacacccgaagtcggtagggtaacctttatggagccagccgccgaaggtgggacagataattggggtgaagtcgtaacaaggtagccgtatcggaaggtgcggctggatcacctcctttctaaggaaaaggaaacctgtgagttttcgttcttctctatttgttcagttttgagaggttagtacttctcaagtatgtttgttctttgaaaactagataagaaagttagtaaagttagcatagataatttattatttatgacacaagtaaccgagaatcatctgaaagtgaatctttcatctgataagaagtatcatcgctgatacggaacatcagaaaaacaacctttacttcgtagaagtaaattggttaagttagaaagggcgcacggtggatgccttggcactaggagccgaagaaggacgggactaacaccgatatgctttggggagctgtacgtaagcgttgatccagagatttccgaatgggggaacccactatctttagtcggatagtatccttacgtgaatacatagcgtgaggaaggcagacccagggaactgaaacatctaagtacctggaggaagagaaagaaaaatcgatttcctgagtagcggcgagcgaaacggaaagagcccaaaccaagaagcttgcttcttggggttgtaggacactctatacggagttacaaaagaaagttataaatgaagcggtctggaaaggcccgccaaagacggtaacagcccggtagttgaaatggctttccctccagagtggatcctgagtacggcggaacacgtgaaattccgtcggaatccgggaggaccatctcccaaggctaaatactccctagtgaccgatagtgaaccagtaccgtgagggaaaggtgaaaagcaccccggaaggggagtgaaacagttcctgaaaccgtgtgcctacaagtagttagagcccgttaatgggtgatagcgtgccttttgtagaatgaaccggcgagttacgatttgttgcaaggttaagcgggaaaagcggagccgtagcgaaagcgagtctgaatagggcgcataagtaacaggtcgtagacccgaaaccaggtgatctacccatgtccaggatgaaggtaaggtaatacttactggaggtccgaacccacgcacgttgaaaagtgcggggatgaggtgtgggtagcggagaaattccaatcgaacttggagatagctggttctctccgaaatagctttagggctagcctcgaggtaaagagtcatggaggtagagcactgtttggactaggggcccttctcgggttaccgaattcagataaactccgaatgccatgtacttatactcgggagtcagactgcgagtgataagatccgtagtcgaaagggaaacagcccagaccaccagttaaggtccccaaatatatgttaagtggaaaaggatgtggggttgcttagacaaccaggatgttggcttagaagcagccaccattgaaagagtgcgtaatagctcactggtcgagtgaccccgcgccgaaaatgtaccggggctaaacatattaccgaaactgtggatgaacctcttcggaggttcgtggtaggagagcgttctaagggcggtgaagtcagaccggaaggactggtggagcgcttagaagtgagaatgccggtatgagtagcgaaagaagggtgagaatcccttccaccgaatatctaaggtttcctgaggaaggctcgtccgctcagggttagtcgggacctaagccgaggccgataggcgtaggcgatggacaacaggtagagattcctgtaccagtgctaattgtttaaccgatggggtgacacagaaggatagggaatcgcacgaatggaaatgtgcgtccaagcagtgagtgtgagaagtaggcaaatccgcttcttgcgaagcatgagctgtgatggggaaggaaattaagtacggaagttcctgatttcacgctgtcaagaaaagcctctaggaagagtagtactgcccgtaccgcaaaccgacacaggtagatgaggagagaatcctaaggtgagcgagagaactctcgttaaggaactcggcaaaatgaccccgtaacttcgggagaaggggtgctctattagggtgcaagcccgagagagccgcagtgaataggcccaggcgactgtttagcaaaaacacaggtctctgcaaaaccgtaaggtgacgtataggggctgacgcctgcccggtgctggaaggttaagaggagtgcttagcttcggcgaaggtacgaattgaagccccagtaaacggcggccgtaactataacggtcctaaggtagcgaaattccttgtcgggtaagttccgacccgcacgaaaggcgcaacgatctgggcactgtctcaacgagagactcggtgaaattatagtacctgtgaagatgcaggttacccgcgacaggacggaaagaccccgtggagctttactgcaacctgatatggaatgtttgtaccgcttgtacaggataggtaggagccgaagagacgtgtgcgctagcatacgaggaggcaatggtgggatactaccctggctgtatgaccattctaacccgccacgctaagcgcgtggggagacagtgtcaggtgggcagtttgactggggcggtcgcctcctaaagagtaacggaggcgcccaaaggttccctcagaatggatggaaatcattcgcagagtgtaaaggcacaagggagcttgactgcgagactgacaagtcgagcagggacgaaagtcgggcttagtgatccggtggttccgcatggaagggccatcgctcaacggataaaagctaccccggggataacaggcttatctcccccaagagtccacatcgacggggaggtttggcacctcgatgtcggctcgtcgcatcctggggctgtagtcggtcccaagggttgggctgttcgcccattaaagcggcacgcgagctgggttcagaacgtcgtgagacagttcggtccctatccgtcgcgggcgcaggaaatttgagaggagctgtccttagtacgagaggaccgggatggacacaccgctggtgtaccagttgttccgccaggagcatcgctgggtagctatgtgtggcagggataaacgctgaaagcatctaagcgtgaagcccccctcaagatgagatttcccatttcttcggaaagtaagatccctgaaagatgatcaggtagataggtttggagtggaagtgtagcgatacatggagcggacaaatactaatcgatcgaggacttaaccaaaaaatgaaacgaagttacctaactgaaccctttcttctctagttttgagagagcaatctttcaacaactgcatattgtctggtagttatggcgagaaggtcacacccgttcccatcccgaacacggtagttaagcttctctgcgccaatggtagttgggggcttccccctgcgagagtaggtcgctgccgggcaatattaaaagtcctaattatttagggctttttttgttgaagtgtttcctttgtcagctatcttattggatgttatattagtaaaagacccttaaatagaatttttaatggagttttttaggtggaggggtgttttttagtggataatggtatatttatagtagctacaatctttgttgtaaatattttgtatgtgaccatttatacggtaaggttgctacttacgatgaaaggatatcgttatttagctgcactttcgagtgtatttgagatgattatttatgttgttgcactaagtttggtattagataatttaaataacatagcgaatgttttagcttatgcagtaggttttggtgtgggtattattgttggaatgaaaattgaagagcgaattgctttaggttatatcactgtaaatgttattacgaaagaatataatttagatttgccgaatcaaattcgtgatttaggctacggggtgactagttggcttgcgagtgggcgtgatggagagcgtatgatgcttgaaattttgactcaaagaaagaatgaacgaaaactatataaacaaattattgaaattgataatggagcatttattgtttcatctgagccaaaacaaattcatggcggtttttggataaaacaagttagaaaataggaagaagcttaccaagcatggtagcttcttttttttatttatttagtgaaatgagctacataataccgctaatagtaataaaatacagtaaaacacgaacgttaagaaaacgtaacaattaaatgttcgatttttcgttgacttttatgatagctattgttagaatgaaggagtcgaaagagattatgaaattaagaaggagttgatcacgtaatgcctgcggaaattggtgtcattatggggagtacctcagattgggatacaatgaaaaaagcatgtgatgtattggatgaacttgaaattgcttatgaaaaaaaagtcgtttctgctcatcgtacaccagatttaatgtttcaatatgcagaacaagcgcgggaacgtggtttgaaaattattattgcgggcgctggaggagcggcgcatttgccaggtatggttgctgctaaaacaactttgcctgttattggtgtgccaattaagtcaaaagcgttaagcggaatggattctctactgtccattgtacaaatgcctggggtgttcctgttgctactgttgcaatcggtgaaagtggagcagtcaatgcgggtcttttagcggcgcaaattttatctattacaaacgatgcaattactaacagattacaaaaaagacgtgctacactagaagaaacagttctagaaagtagtgattctcttggataaaaaatttttactgacaaatagtacaattggtatcatcggtggtggacaattaggacgtatgctagcaatagctgcaaaagcaatgggttaccgaattattgttttagatcctacagcagattgtccagctgctcaagtaagcgatgaacaaatcgtagctgattatgatgacaaagtagctttacgtgaactttcggaaaaagcagatgttgtgacatatgaatttgaaaacattgactacgatgcgcttaaaatgacacaaaacttagtatctgttccgcaaggatcggaattactttcgattacgcaagacagaattttagaaaaggcgtatttagaatctgctaacattaatattgccccatatgctgtaattgttgataaagaagaaatcgaaagtgagataagaagtattggttatccggctgtcttaaaaacagcgcaaggcggatatgatggaaagggacaagttgttattcacagtgcaagtgatattgaggatgccgcacaattgttgcgttacggttcttgtgtgttagaagcttggattccttttgaaaaagagatttctgtcattgttgctcgtaacttaaatggacaagtggaaacattccccgtagctgaaaatgttcatgtaaacaatattttgcatacgactattgcgccggccaaagtggcagcggatgtctatgaagaagcggaagaaattgccaaaaaattagccgatgtacttcaattatgtggtgttttggctgtagaaatgtttgtgactagttctggggcgatttatgtaaatgaacttgctccaagacctcataattcaggacattttacgattgaggcttgttcgatttctcagttcacacagcatattcgtgcgatagttggcttgccgctagtaaaacctgagctattgaaaccagcattaatggtcaatattttaggacaacatgtggatgcagtgaatgaacaaatgatagattacccacattggtttgtacattattatggtaaaaaagaagctaaaatcaatcgcaaaatgggtcatataactatcttgactgatgaaccaaaagcggtattgagtgatatagaagaaacgcaaatttggaagtaactggaggaattaaaaaggatgttagaacgttatactcgtaaagaaatgggcaatatttggacagaacaaaatcgttatcaagcttggttagaagtagaaattttggcttgtgaagcgtgggcagagcttggtgatattccaaaagaagatgtaaagaaaattcgcgcgaatgctaagtttgatgtcgaccgtattcatgaaatcgaattagaaactagacatgatgtagtagcatttactcgttcggtatctgagtctcttggtgaggaacgtaaatgggtgcattatggcttaacttcaacagatgtagtagatacagcgaattcttacttactaaaacaagcaaatgaaattttaagaaaagacttggagaatttcattgcgattattggcgaaaaagcgaaagaacataaatatacagtaacgatgggtcgtacgcacggtgttcacgcggagccaacaacttttggtttaaaacttgctctatggtacgaggaaatgaaacgtaatttagaacgttttaactttgctgctgatggtgtagagttcggaaaaatttctggagctgttgggacttatgctaacattgatccttttgtggaagcatatgtttgtgaaaaattaggaactactccagcgccgatttcaacgcaaacattgcaacgtgatcgtcacgcagaatatcttgcaacgcttgctttaattgccacttctgtcgaaaaatttgctgttgaagtacgtgcactacaaaaaagtgaagtacgcgaagtagaagaattctttgcaaaagggcaaaaaggttcatccgcaatgccgcataaacgtaatccaattggttctgaaaatgtaacagggttagctcgcgttattcgtggacatatggttactgcttatgaaaatgtaccactttggcatgaacgtgatatttctcatagttcagcggaacgaattattttaccagattctactattttattagattatattttaaatcgttttggtaatattgtgaaaaacttgacggtattcccagaaaatatgaaacgtaatatggatagaactctaggattaatttattcgcaacgtgttttacttgcgctgattgataaaggcttagctcgagaagcagcttatgatgtcgtacaaccaagagcaatggaagcttgggaaaaacaagtaccattccgtgaattagtagaacaagatgcaaccattactgaaaatctatctgcagaagaaattgcagactgctttgattacaactatcacctgaagaatgtcgacttaatttttgatcgcttaggattataattacggacagaatacaacctaacctctttgatatatgttttttcaaagaggttaagtaatttataaggagataaattatcgtgactaatgaactgttgtatgaaggaaaagcaaaacgactttttaaaacagatgaggctggggtcttgcgtgttgcatataaggatgatgcgactgctctaaatggtgttcgaaaagaatcttttgctggtaaaggcgaacttaataatcagattacatcacttattttttcttatttagcaaaagaagggatttcgagtcactttattcgggcgatttcagaaacggaacaacttgttaaagaagtttcgattattccacttgaagttgttgttcgtaatgtgatggctggtagtcttgcgaaacgtcttggtaaagaagaaggcgaggaaattccaaatgcgattgtggaattttattataaagatgatgccttagatgatccgtttattaatgatgatcatgtgctttatttagacattgcgacaacaaatgaaatggacacgattcgtcaggctgctcgttcgattaataaggtgttacaagaattattcaatcaaatgaatattactctcattgattttaaattagaatttggtcgtgatgcagcgggaaatattttgctggcggatgaaatttcaccagatacatgcagactatgggataaggaaacaaatcaaaagctcgataaggatgtctttcgtcggaatattggcaatttaacagatgtgtatacagaagtattgaatagattaaagcaagttcaaaactaggaggccacaaaatgtataatgtcaaagtttatgtcactttaaagaaaagcgtattagatccacaaggggttgcagtaaaagacgcagcgaaaagcatgggttacgaagaagtagaagatgtccgtattggtaaatttatggaattaaaagtagcgaagtcagatagagatattcatgaagtgttgaatgaaatgtgcgacaaactgttaacaaatccggtgatggaagattaccgatatgaaattgaggaggcttaaacgatgaaatttgctgtcattcagttcccaggttcaaattgtgaccttgatatgctacatgcgattcgcgattctcttggtgaggaggcggaatatgtttggcatgcggaaacaagtcttgcaggttttgatgcggtattacttccaggtggattttcttatggagattacttgcgaactggtgcgattgcgaaattttcaagtattatgccagaagttttacgctttgctgaaatgggaaaaccagtgcttggtgtgtgtaacggatttcaaattttaacagaaattggtttactaccaggagctttaattagaaacaataatttacattttatttgtaagacggtgccgcttcgtgtggcgaatgccgatacaatgtttactggactttatgaagaaggcgaaattattcaagttccagttgctcacggggaaggtaattattactgtgatgatgaaacacttttaaaattaaaagacaataatcaaattgtgtttacatatgatagcgtgaacccaaatggaagtcgtgcagatattgctggtatcgttaatgaacgcgggaatgtgcttggaatgatgccacatccagaacgcgcggtggaagatattattggcggcactgatggtttaagacttttcgagtccgttgtaaaagcttggaaggaggaacaagtaaatgcctaacatggagccaacgacaaaagaaattaaagaacaaaagatttatcaagaaatgggtttaacggatagtgaatatgagcttgtttgttcgattcttggacgcgagcctaattatactgaaacaggtcttttctctgttatgtggtcggaacattgtagctataaaaattctaaaccagtactcagaaaatttccaacagagggaaaacaagttttgcaaggaccgggtgaaggtgctgggattgttgatattggcgatggtttaggtgttgcttttaaagtcgaaagtcataatcatccatcatacgtggagccgtaccaaggagctgcaactggtgtcggcggaattattcgtgatgttttctcgatgggagctagaccgattgcaatgctgaactcgcttcgttttggtgagctagatactccacatgcgaagtacttagttagtgaagttgttgctgggattgctggatatggtaattcgattgggattccaactgttggcggcgaaatccaatttgatccttgttacacaaaaaatccattagtaaatgcgatgtgtgttggattaattgaagcaaaagatattcaaaaagggcaagcaaaaggaattggcaacccggtgatgtatgttggcgctaaaactggtcgtgacgggattcacggtgccacttttgcatctgtagagtttagtgaagaaggcgaacaacaacgttctgctgtacaagtgggcgatccttttatggagaaattgttgcttgaggcttgtttagatgtgattcgtgatcattcggatattttagttgggattcaagatatgggagctgctgggcttgttagctcaagttctgaaatggcttcaaaagcgggtgctgggctagaattaattatggatgatgtgccgcaacgtgaactacatatgacgccatacgaaatgttactttctgaatctcaagaacggatgcttctatgtgtgaaaaaaggtcatgtagaagaaatccaagctttatttgaacgatatggtttagaagcagttgtgattggaaaagtaacggacgataaaatgtataaaattattcatcacggtgaagtggttgcgaacgttcctgtagatgcgcttgcagaagatgcgccagtttatcataaaccttcgaaagaaccagctcgttatcaagctttccaagaagaggatgcatttgtgccggtgattgatgatgtggttggtgtgtggaaagagttacttgctcagccaacgattgctagtaagcgacatatttatgaacaatatgattatcaagtgcgcacagacacagcagttgtgcccggatcagatgcggcaattgttcgtgtgcgtggaaccgagaaggcgattgcgatgacaactgactgtaactcgcgctatttgtatcttgacccagaagtaggcggagcgatagcggttgcggaagcggcgcgcaatatcgtttgttctggcgggaagccactcgcgattacagatggacttaattttggtaatcctgaaaaacctgaaattttttgggaaattgaaaaagctgctgatggcattagtgcagcttgtctagagcttgatacgccagtcatttcgggaaatgtttcgctttataatgaaacagatggtacaggaatttatccaacgccggtgattgggatggttggtttagtagaggatttggcacacattacgacacaagattttaaaaatagtggcgatgtgattttcttaattggtgaaacaaaagctgaatatagtggctcggaattacagaaattacaacaagggaaaattagcggacgcgcgccagaattagatttagcgacagagaaaaaataccaacaattacttctaaccgcgattcaggaaggattagttgcttccagtcatgatttagcagaaggcgggtttggtgttgctcttgcggaagcgacatttaaagcagggcttggtgcggatgtagaagtaccatttgagttgaatcaactattcagtgaatcacaatcacgtttcttagtatctgtaaaaccagaaaatgaagcagcttttgctaaattaatggaactggaaaaagtatatcgacttggtgtagtaacggcagatgaaacgattcgcgtgaaacataaagaagagctagtaactgcgagtacatctgatttacgatctatttgggaaggggctattccatgcttgctgaagtaaaaggacttaatgaagaatgtggtatttttggtatttgggatcatcctaatgcagcggaaatcacttactatgggttgcatagtttacaacatcgcggtcaagaaggtgccggaattgtttcaacagacggagaaacgttaaaagggcatcggaatcttgggcttttagcagatgtatttaagcacggtgaactagacgatttaaaaggtaaggcagcaattggccacgttcgctatgcaacagctggtcaaaaaaacttaggaaatgtacaaccatttttatttcattttcacagttcttcacttgcacttgcgcataatggaaatttagtgaatgcgaagactttacgccgcgaattagaagaagaaggagctatctttcaaacaagttcggacacggaagtattagcgcatttaattaaacgcagccatactggtgattttgtagaagatttaaaagtagctttaaacaaggtcaaaggtggctttgcatatatgctgcttacagaagatacaatgtatgccgcgcttgatccaaatggctttagaccgctttcgattggtcgaattggcgattcttatgtagttgcttctgaaacttgtgcttttgaaacggttggtgctgaatttgtccgtgatgtggagccaggtgaactgattattattaataatgacggactgcggattgaaaaatttacggaaaatgtgacgcattcgatttgtagtatggaatatatttattttgctcgtccggactctaatattgctggaattaatgttcactcagctagaaagcgttctgggaaaagacttgcaaaagaagcatttattgatgcggatgtagtgacaggtgtgccggattcaagtatttctgcggcgattgggtatgcagaagaagccggactgccgtacgaacttggtctcatcaaaaatagatatgtggcaagaacttttattcagccatcgcaagaacttagggaacaaggggttagaatgaagctttctgcggtgcgaggagttgtggaaggtaaacgagttgtcatgattgatgattccatcgttcgcgggacgacaagtaaacgcattgtccagcttttacgtgaagcgggcgcggcggaagttcatgtgagaattgcttctccaccacttgcttatccttgtttttatggaattgatattcaaacacgaaatgaattgattgcttctaattattctgttgatgaaatttgccgtattattggcgcagattctttagagtatttgagtgaagaaggtttagtagattccattggcaaaccttatccgaatgaaccttatgggggactttgtatggcttattttaacggggattatccgacccctttatacgattatgaagcagaatatttagcgagcttagaagcagaaaaataatgaggagtgacaaatcgaatggcagagaatgcatatagtaaagcaggcgtggacgtagatgctggctatcaagtagtcgagcgcatcaaaaagcatgtagctagaacagagcggatgggcgcaatgggtgcccttggttcttttggcggaatgtttgacttaagtagtttgaatttaaaagaacccgttcttgtttctggtacagatggtgttggaacaaaattgcttttggctattgaagcagataagcatgatacgattgggattgactgcgtggcaatgtgcgtgaatgacattttagctcaaggtgccgagccattatttttcttagattatatcgcaacagggaagacagatcctgttaaaatggaacaaattgttaaaggggtagctgatggttgtgaacaagctggtgctgctttaattggcggggaaactgctgaaatgcccgatatgtacggggcagatgattatgatttagcaggttttactgtcggagctgtcgagaaaaagaaactgattacagaaggtgcagtcaaagccggagatactctcattggtatcccgtcgagcggaattcatagtaatggttactcactagtccgaaaaattttctttaaagacaatgactttaagttaaatgaagcgttcacggaactagatgtgccacttgtggaagagttacttaagccgacacgcatttatgtgaagccagttttagaagttttaaaagcagtggatgttcacggtattactcatgtgacaggtggcggatttgtagagaatttaccacggatgttaacaaatgatttagctgtcaaagtggagcttggttcgtggccggttcttccaatttttgacttaatgaaaaaatacggtcaattgagcgaacttgaaatgtatgagattttcaatatgggtatcggaatggtgttggcagttgcgaaagaggatgtcgaaaaaacattagaagtactcgttcaaaacggggaagcggcttatgttattggagaagtaacaacacgttctgatgatgccgttattttcggaggcgcaaaaggatgaatatagctatttttgcttctggtaatggctcgaattttcaagctttagtagatgatgagcttattaagcctcatgtgaagctacttgtctgtgataaaccaaacgcctatgttgtagaacgcgcaaacaagcaaaatattccggttttcctgtttgatgtgaaaaattatccggataaagaggcttttgaaaccgaaattttattagaactgcgcggtttggaaattgatttattagtgcttgcgggttatatgcgcttgatagggcctacgttacttgcggaattccctgagcaaattgttaacttgcatccgtcgttattacctgcattcaaagggaaagatgcgattggtcaagctatcgaagcgaaagtatcagaaaccggtgttacagctcattttgtggatgccgggatggatacaggaccaatgattgaccaggtcaaagtagtggtagctaaaacagaaacagcagatagtttagctgaaaaaattcatcaagtagaacatattttttatccaaaagtgattcgaggattaattcaaaatggagggaacgattaattatcatgaaaagagcgcttataagtgtatcagataaaaacggcatcgtgccatttgcagaaaaattagtagaacttggtgtagaaattatttcaactggtgggacaaaagcagcatttgaacaagctggcgtaccggttacgggaattgaagcagttaccgaatttccagaaatgcttgatggccgagtaaaaacgcttcatccagctattcatggtggtttgcttgcaagacgtgatacggcggaacatatggaagcaattgctgcacatgatattaagccaattgatttagtcattgttaatttgtatcctttccaagaaacgattcaaaaacctggtgttactttagaagaagcgattgaaaacattgatattggcggaccttcgatgttacgttctgctgcgaaaaattatgcggcggtaactgttgtggttgatacagcggactacgatacagtacttacagaactacaagaacacggcgcaactacttttgaaacgcgccaacgccttgctgctaaagtatttcgacacacagcagcttatgatgctttaattgcagagtacttaacggatgttaccggtgaaactttcccagaaaaagtaacattaacttataatcgaaaacaagttttgcgttacggtgaaaatcctcaccaagatgcagctttttatacagaaccacgcgcgattgaaaactcgattagtgctgcgaaacagttgcacggtaaagagttatcttataacaacattcgcgatgcagatgcggcacttaaaattgctagtgaattcaaagaaccagtggcagttgcagtaaaacacatgaatccatgcggagttggcgttggtgaaacgattgaagaagcttatttaaaagcctacgaagcagatgaaatatctatttttggtggaattgttgctttaaataaagaagttgatgcgaaaacggcagaacatatgagtaaaattttcttagaaattatcattgcaccaagtttttccgaagcaggttttgcgattttagcgaaaaagaaaaatattcgtttgttaactgttccatttgcgggtaacgtggaaggttttgagaaaacttctgttaacggtggacttcttatccaagcgaatgacgctcttgtagaagatacaacaagttatgaagtagtgacagaaaaacaaccaaccaactcagaaatgaaagctttacttgctcagtggaaaattgtcaaacatgtcaaatcaaacgcgattgttgttggctcagataaacaaacgcttggaattggcgctggtcaaatgaatcgaatcggctcagcattgattgcgctagaacaagctggtgaaaaagcaaaaggcgctgtacttgcctccgatgcctttttcccgatggatgatacagttgaggctgcggcaaaagcaggtattacggcgattattcaacctggtggatcgatcaaagataaagaatcaattgcaatggctgataaatatggaatttccatggttctgactcatgtacgccatttcaaacattaatcctcataaaaaggacgtgtcattaaatgaatttattagtagttggtagcggcggtcgagaacatgctattagtaaaaaattactagaatcaaacaatgttgaaaaagtatattgcgctcccggaaatgacggaatgcgtttagacgatattcaattagttgctatttccgaaacagataaagttggtttgattgattttgccaagaaagcagacgtttcctttgtcatcgttggacctgaagtacctcttttagaaggggtggtagatgcatttgaagaagcgggaatcaaagctttcggaccaaaagcaaatgcggctttaattgaaggtagtaaagacttcgccaagcaatttatggagaaatatgccattcctactgctgcctcaagaactttcactgattatgcggaagctaaagcatatttggatgaacgcggtgtaccgatcgttattaaagcagacggattagccgctggaaaaggtgtcacagtagctttagagatggaagaagctgtccttgcgttaaaagatatgatgctagaagaaaaattcggtgacgcatctctcaaagttgttatagaggactttttagctggcgaagagttttccttgatggcttttgtaaacggggaagaagtgtatccaatggcgattgcacaagatcataaacgtgcttatgaaggcgataaaggacctaatactggtggcatgggtgcttattcaccagtaccacatatttcagaagatgtagtgaatgaagctgttgaaaaaatccttcgccccgctgcaaaaggaatggtgcaagaagatcgctacttccgcggaattctttatgcaggtcttattttaacgacagaagggccaaaagtaattgaatttaacgcgcgatttggtgatccggaaacacaagtcgtattgcctcgtttagaaagtgattttgcagcacttatagcagctttactcaacaacgaaaaaccagaagttcgctttaaaaaagaaggaattacgctcggtgtcgttttagcaagtgccggttacccagaacattatgaaaaaggaaataaactcactggcttaaatgatattagagaggatgtcgccatttatcatgcgggaacaaaacaaaatgaaaacggggaatttgtctcaagtggcggccgcgttttattactagcaaaagaagctgaaaccatgagtgatgcacggactttactgtatccagaaatgcaaaaattagataatccaaatttcttttatcgaatggatattggaacaaaggcagaataataaaaagtactatctttaagcaaattgcttggatagtactttttttgtttatttcgtaaagagaaacgtttgtgttttacgcgttggtacgttaaaatatgaaagtaggatatatgagattatttggaggtaaagatatgcaaatagagaagttgcgtggacaaggattggatgaattcttccaagggattttaacgctcgagaatttagaagaatgttatgctttttttgatgatgtttgtactgtgaacgaaatacaatccatggctcaacgtttccaagtagcaaaaatgcttcatgatggaaaaacgtataatgtgattgaatctgaaacaggtgcaagtacagcaacaatttcacgtgtaaaacgttcacttcattatggcaatgatatgtacgatgtcgtattttcaagaatgacaaagccagaataagattggtagggattaatattgaaaaagtttaatagtaaaacctatcagattgtaatcatctctattcttgctcttgcagttatttattttgtgattaatatgatttccactggaactgggcttgatttttctttactgtggcactgggtctttattatttgttttatcttcacgacgcttgctaatgttagagaaaaacgagcaattggaacggcgattggcctaagtggaatcctgatttgtgtgacaagtatcgtactgatggcaatataataaaagcaatctcgctaaaaacttagcggattgcttttttgttaaaacagaaaatcgattaaaccagttgcggagagaaagacaaaaataatcgcaattggtgcaatatatttaatgagaaagagccaaataataaaaacctttttgccaaaatggctgctcgtggtaaattcttttaaaagtaattcacgaggtaatcggtaaccaacaaaaatcgcgataaataatgcaccaactggtaagatgatattcgacacaagataatcggcagcatcaaaaatacttagtccaaaaatctgaacatcgctccaaacaccgaaactaagcgcacttggaattgccattaacacaatcacaagccccatccaaaggctcgcttttttacgattaacgccagcattcatcagcggagcaacagttgcttcaagcatcgagaaactagacgttaatgcggcgaataagaataaaatcaagaaaataataaagaacaacatcccaaacggcatttgattaaatatcgagggtaaaataacaaacaataaccccggacctgcatctggcgtaatgttaaacgaaaatgtcgctggaaaaatagctaacccagcaagtaacgaaacaaacacattcataagcgaaaccgaaatcgccgactgaggtaaactagtcgaacggttcaaataagaactatacgtaaccatcaccgaaatccccacactgagtgaaaagaacgcctgaccaagtgtaataagaaccgtttgagcagtaaaatgactaaaatctggtcgtaagaaaaatgcgacaccttccattgcgcctggtaatgtcaaggacctgataattaacactataaataaaataaaaagcgcgggcatcataaacttgctcattttttcaattccgctgacaactccgcggctaataacgatcacattgagtaaaataaagaaaattgtcgcaccaaccgaaatccatgggttggctgtcgtcacttgaaaatcatggagtaaagtcgcttggttttcaccggcaattccaccagtgagcgttttaattaaataagtaataatccaaccgccaacgacactataaaatgaaaataaaatacttgcgccaactacgcctaattttccaattaagttccatttcgttccaggtgcgagcgttttataagcttgaaccgcatccccaccagaacctcgtccaataacaaactcagcaatcaaaagtggcatgactacaagtaaggttaaaactaaaaacaataagaaaaatgcgccacctcctgcagttgcagccacataaggcagtttccaaatcgcgccaattcctattgcggacccagcggatgctaaaataaatccgacttttgagccccattcttctctgttttcttgcataatatccccatttccttttttctatgtcaatactctagaagtcataataaaatcaaattttcctcatcataccataaaataaaagctatcccaacaagaagtcgtaaaaaaagcttaaaaaaagttaaaatttcctattgtaagggtgcgatgaaatgtaactaatgctataataagatatcccattatagagaattggaggagcatatgaagcatttattcaagttagacccagcaaagaatttacctcgtaatagtgtcacaaagctcattcattctggaaccgatggatttatcattggtgggacagataatttagaaatagaagcagtcgaaaatctgtatgaattattagctgaaacagatttgccgattttccttgaagtaagcgatgaatccatgattttaccggaagcagaacattttttaattccagtcgtattaaatacagaaaatagtaaatggacgcatggtttacacaaagagttaatcaaggaactaggggattttattccttggaagcgaatcacatcagaaggttatgttattttaaataaagacgcaaaagttgcccagttaacagaagcgaaaacagacttaacggatgaagatattattgcttatgcgcgattagcagagaatatatttcgtctgccgattttttatgtcgaatatagcgggatgtacggcgatccggaagcagtaagaaaagtaagtgaagttttaagcgacaccgagttttggtatggtggcggaatccgttccaaagaacaagctgctgaaatggcgaagtacgcggatacgattattgtgggcaatattatttatgaggatttagaaaaagcactagaaaccgcaactatttttaggaagaaaacggtttgattataaagtgtagtatgataaaataagaacaaatgtttgtatggtggtgtataggagaatgcaattgaatgcaaaagaattagttgacggattaaacccagaacaacgaaaagcagtagaaagtacagaaggacctttattaattatggctggtgcagggagtggtaaaacacgtgttttaacccatcgcatcgcttatttagtaagagaacgtggcgtgaatccttataatattttagcgattacgtttaccaataaagcagcgcgtgaaatgaaatcacggattggtaatttaatgggcggagaagcggaatcaatttggatttccacttttcactccatgtgcgtaagaattttacgtcgtgatatagaccggattggctacgaacgcaattttactattttagacggaagtgaccaattatcggttattaaaggcattttaaaagaaaaaaatgtcgaccctaagaagtttgagccacgaggtattttggcttctattagcaatgcaaaaaacgaacttataactgcaagcgaatatataaaagaagcaagtggtttctacgataaaatggtcggcgaagtctatgaaaaatatgaaaagaaactgaagaaaaatcaagcgctcgattttgatgatttaattatggtgacgattcaattatttgaacgtgttccagatgttttagaatattatcagcgcaagtttcaatacattcacgtggatgagtaccaagataccaaccacgcgcagtacttacttgtaaaactacttgcctctagatttaagaatttatgtgtcgttggtgactctgaccaatcaatctacggctggcgcggggcagatattagtaatattatgtctttcgaaaaagattacccaagtgccaaaaccattttactagaagagaattaccgttcgaccaaacgtattttagaagcggcgaaccgtgtaatcgaaaataacggcaatcgtaaaccaaaaaatctttggactagtaatgcggaagggaagaagattttttaccataaggcgttaactgagaaagaagaagcggcttacgtcgttatgaaaattcaagaagaagtaaataattcgagtcgtcctctttctgattttgcgattctttatagaaccaatgcccagtcccgtgtaatggaagaatatttcatgaagtcaaatatggcttacacaatggtcggcggtacgaaattctatgatagaaaagaaattaaagacattttggcttatttacgacttattagtaataatgaagatgatattagtctgacacgtatcatcaacgtaccaaaacgcggagttggaccaggcacattagaaaaactaaacaatgttgccgcagcttacgatttaagtttgtttgaagtacttaatcgcattgaattagccgggatttctgctaaaataagcaaagatttagttgctttccatgatttggttcgcggattcacccaaatgcaagatttcctatctgtaactgaacttgtagaagaaattctcgaaaaaacaggttaccgagcaatgctgaaaaacgaacgaactattgaagctcaaactcgcttagaaaatatcgatgagtttttatctgttacacaaaactttgaaaaagaaaatgacgataaaacattactcgcatttttaacggatttagcactggttgctgacgtcgataagttagaagaagataatgaagaacaaaacggtgcggtgacgctgatgacgcttcactctgccaaagggctagaattcccagttgtctttttagttgggatggaagaaggaattttcccacattctagagccatttatgaagaagaagaaatggaagaagaacgccgccttgcttacgttggtatcactcgtgcagaagaagaacttttcctaacgagcgcgtattcccggatgctttatggtcgtccatcatccaaccaagaatctcgctttattggggaaattcctcgtgacttactagaattaggcaacgaaaataaattaacagctgataaaccgtatgccaaaccgcgcatgccgcaaaaagcaactactgcctataaatcttctggagcggaaacactcggttggacagtcggcgataaagctagtcataagaaatggggcgtaggaacagtcgtaagtgtcaaaggagaaggtagcggaatggaacttgatattgcattcccaagcccaactggagtcaaacgattgctcgcagaatttgcgccaattgaaaaagtataaatttggaaaaagcaggtgaagaaatggctgataaaaaacggtatgaagaactaataaacatacttgatcaatacagctatgattattatgtaattgataatccaacagtagaagatgccgaatacgatcaaaagatgcaagaactacttaaaatagaagaagcgcatccagaatgggttacacctgaatcaccgtcgaaacgagtaggcggagaagttttagaaggttttaaaaaagtagaacatgacacaccaatgttaagcttggccaatgcgtttaatcgcgatgatttggctgattttgaccgccgtatccgcgataaagtcggtgatgacattagttatatgtgcgaactgaaaattgacggactagccgtatcacttcaatacgaaaatggtaagtataaacaaggtgctacgcgaggtgatggaacagttggtgaagacatcactgctaatttacgcacgattcgttctatcccaatgaaactgaaaaaagcttattccattgaagtccgcggtgaagcttttatgccaaaacgttccttccaaaaattaaatgaaatacgcgaagaagaaggccagatgttatttgcaaatccgcgaaatgcagcggctggctcacttcgtcaattagatacaaaaattgctgcatctagaaaccttgatattttcctttatgcagtagctgattttggtgaaatgggtgttgaaacacatagcgcgggcttagatatgcttgaaacactaggccttaaagtcaataaagagcgtagactttgcagtaatttagaggaagtatatgcttacattgacgagtggacggaaaaacgagctggtttagcttacgatattgatggtatcgttttaaaattaaataatttagaacaacaacgccaaatggggacaacagttaaatcaccacgatggtcaattgcttataaatttcctgcagaagaagtacccactaaactgcttgatattgaattaaacgttggcagaactggcgtaataactcccacagcggtgttagaaccagtaagagttgcaggaactacagttagccgtgcgtcacttcataacgaagacttaattacagaaaaagatattcgcattggcgataccgttttaattaaaaaagcaggcgatattattcctgaagtgattaagagcattaccgaagaacgtactggtagtgaaaaacctttccatatgccaaaaaactgtccaacatgtgatagtgaacttgtccgcttggaagaagaagtagcactaagatgtattaatcctaagtgtccagctcaaattaaagaggggcttatccattttgtttcaagaaatgcgatgaatatcgatggccttggagaaaaagttattattcagctattttcaatgcatttaattaaagatgttgcagatttgtttttcctttcgaaagagaaactgttagaattagaaagaatgggtgagaaatcagtaaccaatttactggcatccatcgaagcaagtaaacaaaattcgcttgaaaaattactttttggcttgggaatccgccatgttggtgctaaagcagccaaatcgcttgcagttcattttgaaacaatggataatttgaaaatagcagacaaagaaacactgacaagtattaatgacattggggaaaaaatggcagatagcatcgtgacttattttgcgaatgaagaagtacatgatttactggaagaactaaaaagggctggcgtcaatatgacctatacagggccaaaactagaaaacatgtccgaagaggagcttgtttttgcagggaaaacagttgttttaactggaaaactggaaaaattaacacgaaacgatgcaaaagcattaatcgaatcactcgggggaaatgtttctggaagcgtcagtaagaaaacggatgttgttgtagctggcagtgatgctggttctaaactagccaaagctgaagaactagcaattcctatttggtccgaagaagacttaatagagtacttaccagacgaaggtggattaaacgaatgaaaaaactcataattgcagcgctcggtttaacgcttattctctctggctgtgccccaaaactcgactcaaacgataaagtggtacaaaaagatgataaaaaagcagaaacgggcatcatgacaaaaaatcaaatttcatccaattattacaaaacggtattaccgtacaaagcaagtaaatctcgtggacttgtagtatcgaatatttactcaagatacgatattaacgagttagaatctggtttaatgcgagtttcccaaaataaatattcgccagacaattatcttttccaagaggggcagtatttggacaaggaaacactagaaaaatggttagaccggaaaagtgaaaaaaatcctaatggtttaaatccagaaagtaatggcgacggaaaagatcgtaagccaatttatttagctcacattttagaacaagattatttaaaacaaacagataaagatactgtagcgcttggtgggatttcaattgcactggcaatgaattcagttgattactatcaaaaagaacaatacggcgacacttttgaacaagaaatcagtgacagcgatttactagcacaaggtaaagaaatgtctggtactgtattgaaccgaattcgccaaacaaaagggttagaaaatgttccagttacgattgctatttataaacaagggccacgtgatgctgtagctccaggtaattttcttacttatgcaacagcaaacggtgacagcttatccagttggaaagacgtagaagaaaaaaattacgttttaccttccactgaatctgcaaaagatcacaaaactgacaatgataatttccttaacttcaaaaaagctattgaagattactacccgaactttacaggtgtagttggtcgcgctagatatgaagacgggcaattagcagaacttagtattgatattccattgcaattttatgggcaagcggaaattattggctttacacaatatgtaacagatttagtaggacaacatattcctaaaacagctgatttacaagtcaatatttctacatcagacggtccagctgctttaattactagaaaagcaaatgaagacgcagctactgctcacatttatgattaataaaaaacaatgcgaattgttctttcctgttgtataattatgcaggagaggacagttcttcccatttagcaaggcgggaagcactaccgcatagaaagtaccactaaaaaggaggatggcattttgtcaaatatatccaaagaaacagtagaaaaagtagcaaatcttgccaaactagaagtatcagaaacagaagcaactgcttttgctggtcagcttggtaaaattattgagctagtggagcaattaaatacactagatacaaacaatgtagagccaacaagccatgcaatcgatgtatcgaatgtgttacgtgaagacgtagcaacgaaaggccttgatcgtaaagaagtactgaaaaatgcgccggatcaacaagacggcatgttcaaagtaccaacaataatggaacaataaacacgctaaggagggaaaatattttgggcttatttgatttttcagtaaaagaattacatgataaattagtaaaaaaagaaatcacaccttttgatttagtaacagaatcatttaaccgtatagaagcagtagaggataaagtcggttcatttattactttaaacaaagaaacagcacttggtgtagcagaagagcttggtgatgcaggaattgatccgaacaatatgctggctggtcttcctatcggtattaaagataatatcgtaactaaaaacttacgtacaacagcagcaagtaaaattttagaaaacttcgatccaatttatgatgcgacggttgtttctaaattaaaaaacgcgcaaacgattaatatcggaaaattaaacatggatgaattcgcgatgggttcttctacagaaacatcttacttccataaaacacataatccatgggatttatcaagagttcctggtggctcttcaggtggtagcgcatccgcagttgcagcaggcgaagtattattctcgcttggtagtgacactggtggatcgattcgccaaccagcagctttttgtggggtagtcggaatgaaacctacatatggtcgtgtatctcgttttggtttaattgcctttgcgtcttctttagaccaaatcggcccaattacaaaaaatgtagaagataacgcttatttattagaagcgatttctggtttagatgcaaatgattctacatcgattaaccaaccagtagaacgtttctcagatagcttaacaggtgatattaaaggcttacgcatcggtgttccaaaagaataccttggtgaaggcgtggatcctggtgtcaaacaagctgtgttagatgcacttaaaacactcgaaaaacttggcgctacttgggatgaagtttctttacctcattctgaatacggtgtagcaagttattacattttagcatccagtgaagcttcttctaacctttctcgttttgacggcgttcgttacggataccgttctccaaacgcgactactttagaagaactttatacaaaaacacgttctgaaggctttggtgatgaagtaaaacgtcgtattatgcttggaacatacgcattaagttctggttattacgatgcttactacaaaaaagcacaacaagcacgtacgttaattaaacaagattttgttgacgtgtttaaaaactatgatgttattatcggacctagttccccgacaacagcatttaaaattgatggaatgattaatgatccaattacaatgtattccaatgatattttgactgttccaattaacttagcaggcgtaccagctatttctgttccttgtggattttcagaaggattaccggtaggattacaaattatcggtaattactttgaagaatctttactatacaaagtagcgcacgcatttgaacaagaaacaacattccataaagaaaaaccaaacttataggaggcgtagcaatgaattttgaaacagttattggacttgaggttcacgtagagttaaaaaccaattcaaaaatattttcttctgcgccagctcattttggagcagaaccaaatacaaatacaaccgtagtagatctaggaatgccaggtgttttaccagttttaaataaacgtgctgtcgaatatggtatgaaagctgcaatggcgattaactgcgaaattgctgagcatacaaaatttgaccgtaaaaactatttttatcctgataatccgaaagcataccaaatttctcaattcgataaaccaattggcgaacatggctggattgaaatcgaagttgggggcaaaaagaaaaaaatcggtatcactcgtcttcatttagaagaagatgcagggaaaaacacgcatacatcgcatggttattctttagtggatattaaccgtcaaggaacaccacttatcgaaatcgtttctgaaccagatatccgttctgctgaagaggcatacgcttacttagaaaaattaaaatctatcattcaatacactggcgtatccgatgtgaaaatggaagaaggttcgatgcgctgtgacgccaacatttctatccgtccaatcgggcaagaagaatttggcgtaaaaacagaacttaaaaacctaaactcctttaacaacgtgcgtaaaggtatcgaatatgaagaaaaacgccaagcagaagtgcttaagtccggcggcattatcgaacaagaaactcgtcgttttgaagaagcaacgggtaaaacttccttgatgcgtatcaaagaaggttcggatgattatcgttatttcccagagccagacttagtagatctatttattgatgatgcttggaaagaacgcattcgcgctgaaattccagaacttccagacaaacgtcaaatccgttatatcaatgatcttggtttaccagcatacgatgcgatggttcttacgcttacaaaagaaatgtctgatttctttgaagcaactcttgcagctggagcagacgctaaacaagcatctaactggctgatgggtgaagtttctgcttacttaaatgcagaacaaaaagaacttcacgacacaggattaacaccagaaaatctagcaggaatgattaaattaatcgaagctggaactatttcctctaaaatcgccaaaaaagttttccgtgaattagcacaaaacggtggcgatgcagagcaagttgtaaaagataaaggacttgttcaaatttccgatgaaggagctttacgtactatcattggagaaattttagataacaacgaacaatctattatcgattacaaaaatgggaaagatcgtgcagttggtttccttgtaggccaagttatgaaagcaacaaaaggccaagcaaacccaccaatggttaataaaattttactagaagaaatgaataaacgttaatttttaggcagtgaggcatttcgcttcactgctttatttattaggaatttatagcgaaatttgctataatgttactatcatgtgtcaaaacgcgcttttcttttgaacaacgctgtttgagtgaaggagaggacgaacataatgcaaaaacacgctcgagttatttataatcccacatctggaagagagattatcaagaaaaatctcgcagatgtcctttcgatactagagcaagcaggttatgtaacatctgcacatgccacaactgcagagccaggtgacgccaagcacgcagcagaagaagctgtaagagatcgatatgatttagtcgttgcagcaggcggagatggtaccattaatgaagttattaatgggattgcagaacaaccttatcgaccaaaagtagggattattccaaccgggacaaccaatgattttgcaagagccttacatgttcctagagacgtgataaaagcaacgaagattatagcagctggtcaaagtgtagcaatggatataggtaaagcaaatgatacttattttattaatattggtggtgggggtaggctaacagagctcacgtatgatgtcccaagcagattaaaaacaatgcttggacaattagcttattacttaaaaggaattgaaatgctcccttccttaaaagctaccaaagtaaaagtagaatatgatcaaggtgtctttgaaggggaagtaatgttttttcttttaggtttaaccaattctattggaggctttgaaaaaattgctcctgatgccaagttagatgatggtaagttttcgctcatcatcgtcaaaaaagtgaatttagcagaatttattcgcttagttactttggcgcttagaggagatcatattaaagaaccaaacgttatttatgtaaaatcagaaaaagtaagtgtacactctgaagacaagatgcttattaaccttgacggagaacttggtggcgaaaccccgatggaattccgcaatttaaaacagcatatcgaattttttgcgagtgtagatgatattccagcaaccgatttatttataaaagaaaatagctaaaaactgcccagcttggtagtttttttctttagcctaaatgtcctaactgcaacatagtaaaaaggatgtaattattgttagatatttgtcttatttgcgcaaaacaagtataataggtatcttgacaagaaatgaggtgaatgcgatatgacgagtggatatgtattaaaaaaattcattatggtaattgttatccttatcattgctatcgcagcggctatatttttcttttggcaggttgatgccgaagaacaagcgccgacagtcagtaaatcagaattaattgaaagtaataaagtgtggataaacgaccaaatgcaaattcccttagaggataatgtatttctatctatcccatctccaagtactgaagcaacaatcgctaaaaacggcgatttaatcatagcaacaactaatccagaaattttaaataaattagcagcttctaatagtcgttatgacggaatgaaggcatatcgtcttcgcattgaagcgaaaaaagtttcggaatatattactaatacaaaatatcgttatccaacaacgaccgtccaaaaaaagcttgctaattacgaaattaaaagcggcgaacgaacaatcgaaacaggtcaaaaagctataaaagcagaatcaactaaaaaaagcgatattaaattaacacttgaaacgacttattcaagtaaggatgcagaagttgctgcggctatttttagcaataaaattcccgatgaaataactataaatgacaatacaaaaaatttaagtactcaaaaaaacgtaacgatttatccaaaatcatttgtttatgattttactttacaaaaaaatacgatgcttatatttaaagaccaaaaagaagcaactatcacagaaccaatcggcatcgaatacattattaagtaaagcaaagagaggggcaagggactttggaagcatcccttttaaaaaagaaccaatccgtagaactaactattgaagatttaacacatgacggcagtggtgtaggtaagattgatggctatccgcttttcattccaaatgcattaccaggagaaaagataactgcaaaaattactaaattaaataaaaattacggctttgcgcggatggaaaatattgaagttgttagtgctgaacgtgttgaaccaccttgtgccgtttattcaaaatgtggtggctgtagtttacaacatttgagctacgatggacaactagcttttaaacgaaaccaagtagaagaaacaatgaaacgcattggtaagttaaatgtagaagtaccagacacgcttggtatggaaaacccgtggcgctatcgtaataaatcacaagttccagttggctttgtgaacggaaaattaacagccggtttttatcaaaaaagaagtcatgatattattgatatgtcgacatgcctgattcacaatgaaaaaggggatgttgccgttcaaaaaacaagagaaatcttggcaaaatatgggacagaaccttacgatgaaaaaacaggtaaaggtgatattcgccatattatgactaggtttgcgcacactacaggtcaattaatgattgtccttgtaacaacgaaagagcgccttccttttaaagcggaaattattcaagacttaacgaatcaattagaagtaacgtccatcgttcaaaatattaacccacaaaaaacaaatgtgattttcggtgatcgtacgaaaacactttggggaagtgatattattgaagatacgattcatggtattagatttgcaatttcggcacgttctttttatcaagtaaatcctttgcaaacagaggttttatatcaacaagctattgattccgccgagttaacgggagaagaaaccgtgattgatgcatattgcgggattggctcgatctcactttgtcttgcgaaaaaagccaaacatgtttacggtgttgaaattgttgaccaagctattcaagatgcccgtgcgaatgctgaattaaacaatctaacgaatacaacctttgaaacaggtaaagccgaagaagttattccacagtggtataagaacgggattgtagcggatgttttagtagtagacccaccgagaaaaggttgtgatgaaacactacttgaaacaattcttgcaatgaaaccaaagaaagtagtatatgtttcttgtaatccagggacgcttgctcgagatatgaagatattaacagaaggcggttatgaagcgaagaaagtgcaaccagtagatatgtttccgatgacgacacatattgaagctgtgaccgttttaaccttaaaataaacatacaaaaaccgccaaaatgggataaatggcggtttttgcttttcgagtgtgtgtggttgactaagtcaaattaacagacgtgatttacgaaaatcaagtccaattattatttaaccacgaaataaaaatatggtcaaaggtgttatttttaacttttcaaatattagaatcgataaattttactgttttagtactaaaaagttaaataaaacacgaattaagggctgagggcacatgaaattgtcgctaaattgtcataatatttttttgctttccataaccgtgcgaatttggtaagatgtatgtaacagatttcacatgaatggaggaacttataaaatggctattacaatgtatattgaccgcccagatgctgctcttgacttagagacaacccatccccattttaaagaacattttaaagcaagttactatttagacaaaaacgattcttatagtccttttggatatgccgatggaatggaggtacttcatcgtttagaagaatattttagtgataaaagtgaccaaggacttaatttagcggcttttccgaaatacatgatggaaacagtcaaacattccacttatataccagccaaagacgacggggtagaccgtttacaacaacttttagcggaatatggtggcgctcttagagagtcggaccggataactgtatcggctgcgttagcgcaaattaagataactggctatgtattgcccgctcttcgtgatgccgcactcgaagcacttcatcgcgaaatagaattaaataaaatcgaaaatatcgatgcaggttacgcagatagtatgttttatgacttattaacatttacaaaagattatacttctgttttacccgatatgtggtgtcgacactgcacggaataaaaaaagagcgctaatattattagcgctcttttttacttatctagcatggttaaaatggctttagcgacttcgtgttgattacggttgtccgtattgacaatgaagtctgcggaatcttgataatgggcaattctcggttcgaaaattgctcggatttcttcaggtgtcttttgttgaactagcgggcgtgttgtatcaccttttaagcggttcataaatacttccggatcggtttctaaataaataactggatatgtattttttaagacttttctattttcaggatttagaacaatgccaccgcctgttgcaataacggctttggtattagctagttcttttaatttttcgtgttctagtcggcggaattcttgttcaccatactttgcaaaaatttcagatacactcattccttgttcgcgaataattacttcgtcaatatcaatataaggcaaatcagctaatttcgcgagtatattgccgactgttgtttttccagctcccatgaagccaattaagataacttgatcgatgatgttctcctcctttattatttcttacattttactacttaaaagcattaaagaaattatatcacaaatgtaaaaaacgtcaactgtaaataatccattttgatagcagtttttaaacgatagaatgctttctttccattgtagtatatttctagtacaatagaaataagagagaagtaaactggaggaagaaaatgatagaaaatgagctaaatcaagcgaataaaacagaaaaaatcgaatttggcgtaaaccggcgccttattttttcaagttgtttactttggattgctgccggattattgttatatgtaatttttagtcatataaaaggcgttacaggtacagaagaagtgattttacttgtgtttattggtctttgtgttttacggccattactgcgtttaatcaatatcgcacccactgtagagttaacagaacgtgggcttgcttatcgtggcgattttaagccgtggaatgaaattaaagggacagaactaattaagccagcagtaattcttttttcgcagggaagattaaagatcatgacatcgattaacggacgggaagaagttgcttgggatattgttgcagcagatgtgtctgttagtttagaagaattaagagcaattatccagtccatgcaagaaacgtatacagatgataatacagttggggaagaaatattcattgaaaagaaataataacaagaatcatttttctgttttcttaaaatagggagatgattttttgataaatacatctatagaccatggtatcttgcttcattatagggtaaaataagcaaataatcgtgtaacgggaggaaaacaatggatacagtgctaaaggcgcttaaagtcagaaaagtatatggttcaaaaggaaatttgttttctgcgttaggaagtattagtttagaaatacaaagaggctcatttgtaggtattatgggtccatcaggtgcagggaaatctacattacttaatgttttatcttctatagataagccaacttctggggaaatagaaattggcgggaaacaactgtctaaaatgaaagggaaagatttagcggtgtttcgtagagatcaactaggatttatttttcaagattataatttattagatacaatgacagttaaagataatattgtgctacctctggccttagctcgagtaaagcaaacagaaattgatgaacgttttgaaattattgcacgtcagtttggcatttatgatttacggaataaatacccgacagatatttcaggtgggcaaaaacaaagaacggcggtttgtcgcgcaatgattaccgaaccaacattaatctttgctgatgaaccaactggagctcttgattctaaagcggcaactaacttgttagaaggtctctctcaagctaaaagtgttcggaattctaccattttgatggtaactcatgatgcttttgcggcgagttactgcgaacggattatgttcattaaagacggcgaaatttttacagaaatataccgaggaacaagttcaagaaaacaatttttccaaaaggtgttagatgtgttggcacttcttggaggtggcgaaaataatgttatttaaaatcgcgctgaccaatatgcgaaagaattttaatcaatatatcgtctattttgtttcgcttattgtatgtgtattagtattttttacttttgtctcactttcttataacccactcattgacaaggtgtttaaacgatgggaattatttggtccagcaatgttttcatcggcaagtttaatgttgatattatttattttctttttcatattttattctaatagcttctttcttaaaagaagaaaacgagaaatcggactttattcattacttggtttacgtaaatcgcaaatagttttagttttattttatgaaaatgctttgttatacatgcttgcgaccttatttggtattttaattggcatattttcttcaaagtttttcgcgatgattttgttttggattgttggactcgcgattgatgctgaatttattatttcatttaaagcagttcttgatactgggcttgtctttttttgtatcatgctgttcacttctttttatgctgtttatattgtattaagatataatttaagccaattgtttaaaaatgatcaaaaagaagagaaattggctaagggttctatttttcttatattaattggacttgctcttattatttttggttattatttggcaacaagtaatattgaagtatcaccaatttggctaacatatgatttttttgatgtaatcttagttattatatgttctgttattttagggacatggcttatggtaaggtttggcacgccgtatgtgattcggaagttatatagtaataaacgtttcttttataacggaacaaacatgattggtgtgacttcccttcgctttaggttaaagaaaaatgcaggaacgattgcgatgattgcagtattaagcgcgacgacattaacgattattggatcaatgagtagtttttatgttcgaacgattaatgacatttcagcagaaaatccttctagttaccaagtgcttgatatttcggctaaagatgaacgagaaattattcaaacgatacaaaatgaccaagatcacaaattaaaaagtttgatgcaagcggaaatggttagtgctacgctagaatataaagatattcctaaatataaaacgcggatggataacatgattcatacggtcgtagcagaatctgaatataaccgtattggcgccaaacagcaaagtgattttgagaagccgaaaaagctttcttatggagacgccatcttacttggaaaaaatacgtattatgcaagacaagagattcaagataagtggctatcaagaaaaatggtagtccagtcgaatgagtctttagcgaaaaaaatgccaccaatgaaagtagttgattttcgagagaattcgattttcaatacgggtatttcttatgagacgctcgttgtatcagatgaatattatgatgatttggaaaggctattcccgccagaaagagtggcaatgtttgatattacgaatcccaatcacagtgaagaattagataagaaagtacagactatcgtggacggggaaccttctcttttttctgaaaatgtttcgtcctattatacgaattatcatttgatttccacgctagtaggttcgctattatttattgggattttcatcggtattgtatttttcttagcaacaggaagtattatttattttaaacttgtaacagatgctgtttctgagaagtctaagtttgatatattatttaaattaggtgttaccgaaaaagaagtacgaaggattatttccaaacaagtttggccgatttttgccattccgttgttttttggaattgcccattcaatggctgcattatggggaatttcgattaatttaatggataatatcaaatatcctgttttaattggaacaggtatttacattatttgttatgctgcttattactttttatgtattaattcttttattaaaatcgttatggcagataaaaagtaattggcttttgtgtttaattcagctaaaatgaaaagagagttctgccgaggaggtacaagaaatggttaaggtatatatcgtagaagatgatgaggtaattcgtgatactattagaaaacatttaagtaaatggggatttgaaataggggttgttgatgatttcaataatattttgcaagagtttttatcatttgagccccaattggttattttagatgtgaatcttccattttttgatgggttctactggtgtaatcaaattcgcgaagtttcgaatgtacctattattttcttatcatcacgtaactcgcgaatggatcaaatcatgggaatgaacatgggagcagattattatattgaaaagccagtagatttggatgttttaatggctcggatcaatgcacttttaagacggacatattcgtatgcggatttagaagaagcgaacgtaatggaacataataatgtatttttacacattgatactaatacacttacccatttagaagataaaattgaattaacgaaaaacgaatttttgattttatatgaattaatgaaacaaaaaggtagtattgtaagtcgtgacgaaattatgcgtgcactttgggaagatgaaagttttgtcgatgataatacacttacagtcaacgttgtacgaattcgtaaaaaactagcagaaatcggcttagatgaatttattaagacgaaaaaaggccaaggttatatgattgaatgaagtaagaaaacaggaagatagcgccaaaaaacgcgaacttcctgtttttcgtaaattaaggaggagtcaaaatgaaaattttagtatttggtggtacgcgtttttttggaaagaaattagtagaacgacttgtttccgctgggcatgatgtcacaattggcactagaggaaaaacaaaagatgattttggcgattctgtaaaacatgttgtactagaccgcgaatctagagacgccttattccaattagcaaaagaagaatgggacgttatttatgataatatttgtttctcaccgcgagaagctctttatgcagtagatgcatttaaaggcaaagtaaaacgatacatatatacatcttctctgtccgtttatagtcaaaaaggtcgcgcgttggtggaagatgattttaatccaaaacattatgaaattgttattggtgacaaagatgattttgattacggggaaggaaaacgccttgctgaagctgtgttttttcaaaaagcctcttttccagtggtagcagttcgttttccgattgtccttggactcgatgattatacgaaacgtctacattttcatttggagcatattaaaaaccatgaagaaattggtattagtaatgcgcaggcggaaataagttttattacttcagatgaagcagctcattttttagaatgggtaggggtggattcagaccttactggaccaattaatgctagctctaacggtacatattcgttaaatgcttttatcaaaatgcttgaagcgaaaacaggtgaagtggcactcgttgaagaagtaacagatgatgtggatgattcgccgtttagcatcaataaaacttattacatggataatgcaaaagcaacagaagctggctttacttttgaagatataaaagtctggttgccggcgcttgtgacggatattttaaaagaaaattaatttggaggcaaaaatatattatgttaaattttgaagagaaaaaagcgctaatagaatcaatcgatggttttgaactgcatgaaatttctatggggcgcgtgaacgtacattatccagcgagtaaaagggataaaaaaatcatcgtcaaacatcttcatcctaatggtaacgcgtttgtttacgcgccgtttttagaagtagaaccgctagataagcaaggttacgtcaatgtaaaagactactctcaaaatgaaattcgcgtgttgttacttgaagcgaaagagtttatggacaaagatgaagatgggtttaaagaaggttttacaaaaatataccaagataatgaaggcgaaaagctttctttagtctatgaaaataaaatgtgggttatttatacaggagaaaatctagaagcggttttcccaactttagaagctgcagaaggttatttacttgatgaaggtttttttgaagcataattaacggaggcgaaaaataggtggagaatttaaagcaactgcaagaacgggtcgcagtaagtgatggccgtgcaaaagcagatttagttataaaaaatggacgaatagtaaatgtgttttcaggtgaaattatggaaggcgatattgcgattaaaaacggttatattgctgggattggtcattttccagatgcagatcaaataattgatgccgctggagaatttatctcaccgggctttattgatgcgcacgtccatgttgaaagtgcgatggtaaccccctctgagtttgcccgggtgttacttccaaatggcgtaactacaatcattacagatccacatgaaatcgccaatgttgctggagaaaaaggtattgaatttatgcttgaagatgcaaaaggcgctccgcttgatatgtttgtcatgctaccatcatccgtaccagcaacagaaggtgaacataacggcgaaacacttcatgcaaaacagctccatccactttataaacacgaaaaagtaatcggtctcgcagaagtaatggacttcccatctgttgcaaaagggagcgcagatattttaacaaaaattattgatgcaaaacaagaaggtggcagaattgatggccacggggcaggtttaactagcgcggatttaaataattatcttgctgttggaattcgaactgatcatgagagtacgagtgccaaagaagcacttgatcgcttacgtgcgggaatgtttgttatgttgcgcgaaggtacagtcggtcgtgatttaaagcaaactatttcagcagtaacggagaaaaatagccatcgtttttgtttttgtacggatgataaactaattaatgatttacttacagaaggctcgattaattataatatccgactcgcaattgaaaacggtgttgagccaatcacagccatccaaatggcgacaattaatgcggctaattgccataacttgccttatctaggtgcagttgcagcaggctatcaagcggatattgtttttctaaaagacttaaaaacaattgaaattagcaaagttttaaaaaatggacaagttgtcgttgaaaacggaactcgtaaagaagcagcctttaaaaaggaaaacaaagcgaagttcatttctccaaaaattaatcatcatttaagcatcaaagatttagaacttccattaacaaatgaaacttgctatgtcattggaatgcaacaaaataacctttttacagaaaaactaatggaacaagtcacgattaaaaatggtaaatttgttccgtcaatcgaaaaagatttgctaaaaatggctgttgtggaacggcatcataatactggttgcgtcggtgttgggattgttaaaggtttcggcttaacagaaggtgcgattgctacgaccgtcgcgcatgattcccataatattgtcgcagttggtgtgagcgatgaggccatggaaaaagcaatcgatcatgtgacaaaaacaggtggaggcattgctgtagtggacgcagcaggtaatgtattacatgatttagcgctccaagtagcgggacttcttagtgataaaccatatgaagaagtagaaaatgatttggcaggacttttaaaagcatttaatcaaattagtaaagctaaaggatttgatccatttttgacattgtcttttctgactttaccagtaattcctgaattaaaattaacagatcaaggattgtttgattttgcgacattccaaattattccaaatgaagtaaattaactcgaatgagggaggtgcgatatgaactggtggagctatataaaagataaacgatttttcttattattcttttgcagtattatgtttttcgtcggggtattaatttcaattgatcctaacagtaaattaactctcgggaatttcatttacttatatgtctttgtttttgtcttcctgctttcttacttagtgttaggctacttctttaaatacaattattggcgtgaaatggaagacctagtaagtggcgaaattgaagaaaatatcattgaattattaccaaaaccgcgaacacgcgagcaagctttttttaatcagctaatggcaaaaaaacataaagaagaattacgaaccattagtaaacttcaagataaacaacaagaatatcatgatttcattttatactgggtacatgaagtgaaaactcctgttgtagcaagcaaaatgttaattaataacccagatttaaatgataccaaaacaatttttaaacagattgatgaagaattagaaacaattgataaattagtaatgcaagcactctatttttcaaggcttgatacgttttctaaagactatttcatccaagaacaaaatcttggtgctgttatgcgcgaatcggttaagcgtcactccaagcttttcattggtaaaaaaatgaaacttgatttacaaaatgtagatattgatgtgcgaactgatagtaaatggctgggctttattatcgatcaagtgttatctaacgcattaaaatatactgctgatggtggcgatattcaaatttggtgcgatacagaagtaaccggaaaaaaagtgcttcacattaaagacaacggtcgaggtattaaagaagaagatttacctcgcgtctttgaacaaggctttaccggcacaatcggtcgccaagaaaagaaagcaactggaatggggctatatctcgctaagcaaatggcgaagaaattaggtcatgaaatttgtatcgagtctaaaagtgaaatagggacagaagtacgcatttactttgaacaaaaagacgattacttactaatagcgaaagattaacaaaaagacaagcaaactactaactgtttgcttgtctttttttgtttaattaaaaatggttgactctatcgctttatcgtggtagagtattagcaagaagaagtaaaagcgatgaacagaacaagtagagcgtcattctttttaagagagtccttggttggtgtgaaaggataaagatagcgttatcgaacacatctcggagctggtttactgaagcataagtgagtaggtgaactcgggaaaagcccgttatagcttgttagtctcgaactaactgaggctggtgctgtgaagtatcagtaaattgaggtggaaccacgtgaatagtattctcgtcctcttggcaattttgtgccaagtgcgacgagatttttttatgtaaaaaaggagcgaaacaatatggattatatcatggaaattttaccagcattacttgacggggcgaaaacaaccttactcgtttttgtcgtcacgctagtttgttctatcccgctaggagctatagtggcagtaggaaacattagtaaaatagcccctctgaaatttattttaaacatttatatctggataatgcgaggtacaccattacttttacaattaatttttatctattatggtttgccgattatcggagttgtgtttgaccggatggacgcggtgtttattgcttttattttaaattatgctgcttatttcgcagagattttccggggtggctttctatcaatcgaaaacggacaatatgaaagtgctaaagttcttggtctaacttacggtcaaacgcttcgaaaaattgttttaccgcaagttgtcaaacgtgttttgccggcgatcggaaatgaagttatcaatttagtaaaagactcttcgttagtttacatccttggcattggtgatttactaagagcaggaaaaattgctatgagtagagacgttactttaattccactcgtattagtggctgcaatatacttagcgttaacggctatcctaacgctactatttaaacaattagaaaaacgttttagttattataaatgaggtgaagaaaatgttggaaattaaaaatttatcgaaaaaatttgatcaaaaaacgattttagataatgtgaatattgcgcttcaagacggggaaattctttctatcgtcgggccatccggtggcgggaaaaccactttgcttcgttgtattagtggtcttgaaaaaatggatgccggagaaatttttattgacggtgaaaaaattgatccgatgtcgagaaaagatgtggaaaatacgattggcgtagtttttcaagaatttcacttgtttccgcatttaagtgtgttagataatttgattttggcaccgacgcttgctaggaaaactaaaaaagaagaagctattaaagaagctgaaaggttacttggcttacttgatttagcagataaagcggacaatatgccttaccaattatctggaggacaaaagcaacgtgtggctattgctcgggcactggcgatgaacccaaaagtactactatttgatgaaccgacatcggctttagatcctgacttacgagatcatgtggcgtcgttaattttgagtttgaaaaatgttggtattacgcagattattgtgacccatgatcatgattttgccaaaaaagttgcagatcaaatgatggaagtcgaaccactaaaaaaggaggcaatttaatatgaaaaaaggattattaataacggtaatggcaattgtaatgttagcgctaggggcatgttcaagtggtgaatctaaggaagaccagtggagtagaattaaaaaagataaggaagtcgtcattggtttagatgatagttttgtaccaatgggatttcgtgataaagatgataatttagtcggatttgatattgaccttgcaaaagctgtttttgaagaatatggtattaaagcgaaatttacgccaattgactggacgatgaaagagtctgagctgaaaaatggttcgatagatttgatttggaatggctatacggtaactgacgcaagaaaaaaacaagttgcatttagcaaaccttacatgaaaaacgaacaagtattagtgacattgaaatcaagcaatattaataaatttagtgatatgaaagataaaacgctaggggctcaaaacggcgcaagttcgattgatgacatggctaaaaaaccagaagtgctcacagatattatcaaaaacaacgaaccagaattgtatgatacgttcgatacagcatttattgatttgaataataaacgcattgacggcttgattattgatgaagtatacgcgcgttattatattgataaacaaaaaaataaagatgactatactattataactggtggctttgatccgaccgattttgctgtaggtatgcgtaaaagtgataaagaactgcaatcaaaaatcaatgaagcgtttgaaaaattatacaaagaaggaaaaatgcaggaaattagtaaaaaatggtttggtgatgacgaaatcgctaagcagtagctagattgacagtaggtttaagtttcgatacaatttgaattataaatgtcgcagccgaatatccgaccgtgccagacagaagggatgatttttgttgaataaggaattgattgtacgcggagctccacaagagtatttttgccaagtaggcgcatgggatactttacctacccacttagaacgccgcggtttgaaaaatgttttagtagttcgtggaaatgcttcttgggaagtcgctaaaaagaaattcccggtattatctaatgttacatctacttttgaagtatataatggcggttcaacgtatgaggaacgcgatcgtctggtagcgataatgaaaacaaataatatggatgcgattatagcagtcggtggcggaaaaattgctgatgtatgtaaagcagcggcagcagttttacggttaccagtgattattttaccaacacttgcttccacttgtgcggcttatacaccgcttagtgtgatgtatgacgttgaaggcgcaatgattcgttatgacgtattcgctagcagcaacgccttattattaattgatccggaaatgattttagattcaccaaaagaattgcttgttgcaggtattggcgatacgctcgctaaatggtatgaagcagatgtgattattaaatcattaccaactaaatctgtcgaaatcgaaattgctcatattgctgctaaaatgtgccgagacaatttactgcaatttagcgaagaagcacttaacgcaatggataagcaagaattaaatgaagcattcgtgaaaattatcgaaacaaatattttagttggcggaatggttggcggttttggtgatgattatggacgttgtgcgggagcgcattcgattcatgatgcattaactatggtgccagaaacgcatcatttgttacatggtaataaagtggcgtacggaattttagttcaactagttattgaaaatcgatggaatgaaattgaccaattactaccgttttatgccaaactgggtcttccaacgagtttgtatgatatggggctggcgacacttactgaagaaacaatcgttgctgtatctaaacgagcaactgagccacatgagacgatccatatgatgccaggtgaaatgacagctgaagtagtattaaatgcgataaaacagctggaagatagcatggcaatgaagcgtgtggctaagtaaaaatgattattcgaaaagaacaaccacaagattacgaggccattcgtcgtgtaaatgaggaagcttttaaaggtactgtggaagcagacttaattcaaaatatccggaaatccgattattatcagccaggtttgtcacttgtagcagaaacggaagatgggcttattgtaggctatattatgtttagtgaaatttcactggagacagctgggcgcagcagatttattttaggtcttgccccgcttgccgttttgccagaataccaggggaaacgggttggttcaagcttaatggaggaagggatccgcttatcacgcgaaaaagcatatcccgctattgctgtgttaggacatgctgattattatccgcgatttggatttattccttccaatcaatttgcgattccagcaccatttgatgtgccatctgaatactttatgctacttgaactgtatgatggaagtttagaaaatctagcagggacaattcattacccagctgcattttctgaagataattaattggaaaagaacgaaataataaatgaacggaacaaattctcagaaggggataggttccgtttttttgtcgtaataatccctacagatcgacgtaactctttatctcggagtgcaatactcttcgtttctttaaaaatcgcaccatctaaaatcatttccggtaaaatactaatgccaagaccagcgccaaccaatccttgaattgtataaaaatccctgctttgaaaagctatttgcggttcgaagccttttttattcgccgctttcgtaacgattttatataaatcgaagtcttcaggataaagtacgaatttttcagaagagagttccttgagtgaaacagtgaaattttctgcaagatgatgacttgttgggacgattaatttcaatttttcatcaaaaaaacggagggcttcaatttgttcactagattcgggtactggagataagaacgtcatgtctaaaacaccatttactagcatttcggtaagttcttcatttgttccttccataaattggtaggtgatttctggatatttttctcggaaagtggaaataacagatggcaagactttggtagatagcgaattgggcaggccgactctaactgttcctttagtgggatcggtgtattcagttacgagggcttcggctttttgtagttcatttaatgcgattgtagcttgactcaggaagtcttgaccgacactcgtgagctgcatattacgaccgacacggtcaaataaaggcacacctagttcttcctctagtttcgttatctgtctactaacggcagattgggctacgtgcaaattctcgctagctttagtcatatgctcgacgcgggctacttccatgaaatactttaattgtctaagttccattacttacctccaattgttctcgaaatgagattgttttattctattatatatattgtttcgataaatgaaaaggaataaaatagatactacaagaaatgtaaggtaagctggatcgccaattaattatcagttaatttgaataattccgatgtaaaccatccggatgattcagtttttgaagaggaggagttaggatgaaacaaacaaatttgccaaaaaaacacggcctgtataatccagagaatgagcatgatgcttgtggtattgggtttgtagctaatattaaaaagatttcttctcataagattgtcgaacaaggaattcatatgctttgccagcttaaacaccgcggcggggaagttggaggagatacaggtgacggggctggtattttgcttgaaatttctgactctttcttccgacgtgaatgtagcaagcttggcattacgctaccagaaaaatatcattatgctgttgggatgtttaatttccctcaaaataaagctcagcgcgaatgtttaatgtcagaaacagaaaaactaattgcaagcgaaggccaaacatttttaggttggcgtaaacttcctactgatgttacaaaagtaggtgccggagctagaaaaacagagcccgcaatgtatcaattatttattcagaaaaatgccgaattggacgaagccggttttgaacgggcgctttatttaattagaaaacaagtcgaaaaatttgcagctacttctgaactaattaccgaaactttttacgttccaagtttatcgacacgaacagttatttttaaaggaatgctgctaccagagcaaattaatcaatattacttagacttagcagatccagcttatgtatcggcttttgctttggtgcattcgcgtttttcaacaaatacttttcctagctgggaacgggcgcatccataccgctatttaattcataacggtgaaattaatacgcaacgtggcaatgtaaactggatgaaagcgcgggaaaaaagagcggaatcagctttacttggaaaagatttagctaaagtattaccagttattgacgaaagtggaagtgactcggcaacgttagacaatgctttagaatttttagtgcaggctggtcgttcgctacctcatgcggcaatgatgctaattccagagccgtgggataaaaatccacatatgacagatccaaaacgcgcattttatgaataccatagtactttaatggaaccttgggatggcccaacatcgatttcatttacaaatggtcgtgttatcggcactattttggatagaaatgggttacgcccggcacgttattatgaaacaaaagaccatacaatcatttactcatcggaaacaggtgtcgtgccagtagatccgagtgaggtaattcgtaaagaaacggttggcgcgggaacgatgttgctgattgatttagaagcgggacgaattgtcactgattctgaacttaaagatgaactaacaactgaaaaaccgtatcgtgaatggctagatttagagatgacagagattgctgacttagttacagctgatttacgttatgagtcgatggataagtcagagcgtttcaaaaaacaacgtgcatttggatatacgcaagatgaattaaataaaattttgattcctatggtcacagagaaaaaagatccgatgggcgcaatgggttatgatgcaccgcttgcagttttgagtcagcgcccccaagtattgtttaattactttaaacaactgtttgcgcaagtaacgaatccgccaattgatggtatacgcgaagaaactgttacctcggcgatgacgctacttggtgatgaggggaatattttaaatccaactgcgaaaaatgctaatcgaattcgcttaaaaacgcctattttatctcgaaaagaatttgctgctctcaccttacaaacaaaattcgctaaaccaacagctactttaccgattttatttaaggcggaagagcgggatggattagaagcatgtttggaagaattatttgaagcagctgataaaaaaatcgcgaacggggcagaattgctagttttatcagatgatggcgtgaatgcggagtggattggtattccagcattattagctgttagtggtttgcatcatcatttagtaaaagcaggaacgcggacgaaagtaagtattatcgtaaaaacagcagaagcaagagacgttcatcaatgtgcactgttaattggttacggggcggatgctgtattcccaagtttagcaattgatacttttgatggcttaattaaagaagggcgcattaaaggcttcacgctagatgaggcggaaagtcgttatattgaagcaattaccgatggaattttaaaaatcatgtcgaaaatggggatttctaccgttcagagctatcgtggggcacagatttttgaagcaatcggaattggcgacgaagtaattaacacttattttccgggtactgcctcacaaattggtggtattccactagaagttatcgctcaagaagcttggttacgtcaccgtgaagcatatcatgatattggctaccaaagtttcacgcttaatacaggcggagagtatcagtggcgttcaaatggagaatatcacgtatataatccacttgcgatccattctttacaacaagctacgcgtgaaaatgaccgagaaacatataatttatattcggatttaatgcaaaatcaaagtaatgcctttttaagagggttattaacatttacaagcgaccgcaagccgattccattagatgaggtagagcctgcggagtcgattttcaagcgatttaagtctggcgcgatgtcttatggttcgattagtcaagaagctcatgaggcacttgctatagcgatgaaccgtattggcggcaaaagcaatagtggagagggcggcgaaaacccgaaccgatttacgccagatgaaaacggagattggcgtagaagtgctataaaacaaattgcttctggacgttttggcgtaacaagtcattatttggtcaatgcagaggaacttcaaatcaaaatggctcaaggggcaaaacctggtgaaggcggtcatttacctgggaaaaaagtttatccgtggatttccaaaacacgtggttcaacaacaggggttggcctcatttcaccaccaccgcatcatgatatttattcaattgaagatttatcgcaactaattttcgacttaaaaaacgctaaccaaaatgcgcgcgtaaacgtaaaattagtttcgaaaacaggaattggaacgattgctgctggggttgctaaaggaaatgccgatgtcatcttagtaagtggctatgaaggcgggaccggggcagcggcaagaacaagtatccgtcatgcaggtgtaccgtgggaaatcggcctagctgaaactcatcaaactttactgctgaacggtttgagaaataaagttgtcgttgaaacagacggaaaactaatgaccgggaaagacgttttagttgccgctatgcttggcgcggaagaatttggattcgcaactgcgccacttgtaacactaggttgtgttatgatgcgtgtttgccatttagatacatgtccagttggtgtagcaacgcaaaatcctgagcttcgtaaaaaattcaatggttcagcagattatgtggttaactttttccattttattgttgcagaaatgcgcgaaatgatggctgagcttggatttagaagtctaacagaaattattggtcataaagagtttttaacaacccatgagaaaaaagaagcgcactggaaagcgaaatatatcgacttttcgaatatgctttacagtgatgacttttataaaaatcaagtccaatactgtacgaaacagcaagaccacaaaatcgatcaaacgctagatatgcgagaaattgttccattaattaaaccggcactcgaaaacggtgaaaaggtaactggaactttcgcagtacgaaacgttgaccgcgcaattggtacgattgctggctcctttataagtaaaaaatatggtgcggtaggtttacctgaagataccatttcacttgattttgtcggatcagcaggtcaaagctttggcgcttatacaccacttggtatgacgcttcgaattcatggtgacgctaatgactacttcggaaaaggactttctggcggtaaattaattgtaagtccagatcatagaacgccaattaaagctcatgactccgcgattgttgggaacgtaacgctatacggggcaacgggagggcatgcgtatatgcacggaaaagcaggtgcacggtttgccgttcgtaatagtggtgcaacagctgtagtggaaggcattggcgataatggttgtgaatatatgactggcgggacggtagttattctcggagaaatcggcgagaactttgcagctgggatgtctggtggagttgcatacatttacacgaaaaacagccaagaaacaactacaaaaatcaaccatgaacttgttaacagtaggtctacgttatctgcaccagaattagctaaactaaaacagttaatcgagcaacatgctaaccttactcgaagcgagtttgcacaagaaattcttagcaactgggaagatgaaaaagcgaattttattttcgttatcccgaatgaatatgaaatgatgttaacaagaataacttcactagaacaaactggaaaaacacatgatgaagcagaattacaagctttttatgaacataaagacggaaaattaattgccggagtggcgaaatagagaggagtgaaagcatgggaaaagcaactggatttatggaatatgatcgaattccttcgccaggacgtgatccgaaaagtcggacgcgtgactggaatgaatatagtttaccgatgccggtagcagatttaactttacaagccgctcgctgtatggattgtggtgtgccattttgtagtgtaggaatggaaattaaaaatggtgtgtcaggctgtccgctgcataatttaattcccgagtggaacgatgccgtttaccggggtgactggtatgaagcgttacaactgcttctaaaaacaaataattttccagagtttactggtcgaatttgtccggccccgtgtgagggtggttgtacagtagctatttctgaacctgctgtcggcattaaatcaattgaaaaagcaattattgatcgtggttttgaggaaggttggattaaaccgcaacctcctaagaaacgtaccggcaaacgtattgctgtgattggctctggaccagctggacttgcctgtgccgatcaattaaataaagctggtcatagtgtaacagtcatcgagaaaagtgatcgaattggtggcttattgatgtatggtattccaactatgaaactagaaaaagaacaagtgacacgccgagtgaacttgatggcggaagaaggaattgaatttgtaacaggtgttgcagcaggtactgatgttacttttgctgaactgcgcgctgaatatgattcgattgttcttgcgactggggctggtaatgcacgagatataccgcttgctggacgtgatgcggctgggattcacttcgccgttccgtatttgacacaaagcacgcgtgataatttagataatggcggagttcaaacactttctgctaaagataaaaatgttgttattattggtggcggagatacaggggctgactgtgtggcaactgcgcttagacaaggcgctaaaagtatttatcaattcggtattcaagataaattacccgaattaagaaatggtgaaaatccatggccgcaatatccacgtgttttcaaaatggattatgcgcatgaagaagcagaagcagtgtacggcagagatccacgtgagtatctcatcaatactacttctttcgaaaaagatgcagcaggaaatcttgttgggcttcacacggtagaagttacagaagataaagagacgagacaatatacaccagtagaaggtagcgagaaatattttgaagtagatatggttttaattgctattggcttttcgggtacgacagaagatatatttactaatttcggtgtaggaaaaacagagcgccatacaattgacgctgctaaaggattttaccgcacaagtgaagaaggcgtgtttgcttgtggggatgcacgtcacggtcaaagtttagttgtaaccgcgattgcagaaggaagagaagcagcacgagaagttgacttttacttgatgggagaaacatttttaccataataaaaaagagcttatcctaaaaagggtaagctctttttggaccaattatttcattcctgaaacattgaatccttttaaaatgtacttttggaatgtcatgaaaatcaagatgattggaatgaccatgaaagttgctccggccatttgtaaagcatagttgctgccgtattgtccttttaataattgaagaccgactgatagggtatagaatttttcgtcgttggcaatgattaacggccataagaacgagttccaaccggcgatgaatgtaagaataccttgtaccgcaagcacagggcgggaaatcggaataactatccgccagaaaatataaaattcactagcgccatcaagtcttgctgcttcgagtaaatcatcggatatggtggacatgaattgacggaataagaaaatcccgaatgcgccaacaagtcctggaagcacaatacctgtcatcgtattcgttaacccagccgcattaagcagcaagtaaaccggaatcattgttacttgtcctggaatcatcatagtagcaaggacaagataaaataacttgtttttccctttaaatttaaatttagcaaagccgtaacccgccatcgcatttaaaaataaaccgaaaaacgagaagaatacaatgattaacgtattttttaagtaaatagcaaagtccatttcggtaaatagtttggtgaaattatctagtgtaaaagtttctggccaaatagtaggtgggatttttaaaatttcagcatccgttttcaaagaggagagaaccatccaaatgaacggtaaaatcataaagaatccgccaactgttaaaattgtaattacggcaatttgagcgccgcgcgacttttgtctatattgattcatttataaacactcctctcttaaatatccccgtcattatttttgcgctgaattcggaattgaataatcgtgataataataatcgcgataaacaagataaacgatccagcagcggcataaccaaatttacttaattggaaaccgttttgatagataaagagggcaacagagttcgtactatcaagtggtccaccttctgtcataacaaacggctcctcgaagaattgtaaccaaccaatcatcgttgtaactgttacaaagaaaatcgcaaaacgaagcattggaacagtaattttaaatagttgttggcggctatttgctccgtcaagtgaggctgcttcataatattcacgtggaatgccttgaagcgcggctaagaaaataatcatatttacaccgattgctcgccaaacagctaggataatcagtgataatttcgcaatagtagggtcttgtaaccatggaactggtcctaagtctaaaaacgaaagcaaatagttaagtaaaccaaagcgcggattatataagtaactccaaacaacggctacagcgacaacgtttgtaattgaaggagtatagaaaattaaccggaaaaattggaaaatctttgcttgcgaaaagttaatcataagcgcaataccaagcgagcaaacgataaccagtggaacgccaataactacatagaaaagcgtgttaaaaatagattttaaaaataccgggtcttgcataatattgacgtaattgtccacaccaacaaagttaattttagagtaatcggcaagcccgactaaatcaatgtccgtaaaactaatgacaaaagcaagcaaaatcggaagtagggaaaacagaagaagtaaaaacagtgctggcgatataaacaaatagggtgtgtttttatttaaaaattgtttcataacatccagtccattctaaaagggcaaatggcagaataaatcatttgccctttttattcgttattttttaagaagtgcttctacttgatcgttgaaagtatccatttgtgtttgtacatctgccccgccacggtaaatttgttcccaagattttccgtataattgagcaatttcttcaaattgtgggataagtggcattggttctgcagttttcatttgttcgccaaagactttgtagtaaggatcgtttttcagcatatcgtcttcccaagcatccatacgtgctggcatcgagtttgtatcttttaaccaagataattgaacgtcaggttgactcatatagtccatgaatttaagcgcatcatcttttttattactatatttgaaaatggaaaggttcgcgccacctaagcttgattcgttattttcttttttaggtagtacagcagttgcccattttccgtcaatgtcaggggcagtgtctttcagtgtattaaccatccaaggaccactcatgaacattggtacaatgccgtcgccgccaaagctttgagaagcatctaaaccaagatcagtgtctggtgcggaaccatttttaatgaaactatctaaataagtaacagtgtctacgaaaggttttttattgaatactggagtaccgtctttatcgaaaagaggggagccgttttgacgtccgaaaatgaaaccagtagtttgttcgtttggatcaattgcaaagccgtacatatctttgccgcgtttagaaagtttaagtgctgcgtcagaaagttcatcccatgtttttggagcttcattataaccaacttttttcagtaaatcggtacggtagaataatacgcgagtttctgcataccacggaacaccgtaagttttgccatcaaattgagtagtttttactgaacctgggaaaaatagatcagaattcatatttttacttttttcgacatcttttgtaatatcaagtagtgcaccagcttcgacaaattcaggcatccacgttgttcccatttggactacatcggggccagattttgaagcaacggctgtaagtaatttatcatgtgcatttgcccaaggaataacttgaactttaacttcgatgccagtatctttcgtgaatttttgtgcgagttcttttaatgacttggcttcatcgcccatagcccaaacatttaatactttagaatcgctggaatttgcatcatcctttgacccaccacacgccattaatactaaactaagcgacaacactaaagctaaaacgacaaacatctttttcttcatgatttttcctccattttttgtttttttcaaagcaacttgattaactaaaagctgttaaagaataaaaactgttgtacagaacttgcgcgccgtacgggatgaagcaaattgtgaaaaccaattcacatacacaatatttcatagaaacgtttcgacaaggttattatagtatattatgtaatcggtttcaagtgaattgctattttatttttagtttatttagttaggacgttgcgtatcaatgcttttggtatcagaaaaatttgaacgagtaaaattctcaaaaacgagatactatagaaagaactggaaaataggaccgtttcaccatgtgaatgtcgtttttggttgactaaagaaaagaaagcgcttatactgttgttatatttgaatagaaacgtttcgaaaaatgtgtacaggaggttcctatgaaacaagaaaaagtacaagaattagttagtcaaatgaccttagatgaaaaaatcgctcaatgtcttcaactttcaccttttctttttaaaggtacaaacaaaaatgcagaactaacagggccgcttcttcaagaaatgaaattaacggatgcgcatactgaaaatgcgggttcggtgcttggatcaagttcggcgcttgatatgattggtattcaagaagcttatttaaaaacgaatcgcttaggaattccgcttgtttttatggcggatgttatacatggttataaaacggtttttcctattccacttgcacttggttgttcttttgaccgggagacagttcgagtgatggcagaggtttcggcgcttgaagcaactgcagatgggcatcatgtcactttttcaccaatgcttgatttagtacgtgaccctcggtggggacgtgtgatggaatcaactggtgaggatccatttttaaatagtgagcttgggaaagcaatggtagatggttaccaaggtgatgcgagtaaactaaatgaaaacttggagcagatggcggcatgtgtcaaacattttgctgcatacggggctgcggaggctgggttggaatacaacacagttaatatgtctacgcgcgaattatatcaaaattatttacctgcttacaatgcggcgatacaagctggagctaaattagtcatgactgcttttaacgtagtggacgggattccagcaacaatgaacaaatggctgaaccgagatgtgctacgaggcgaaatggagtttgacggtgtacttatttctgactggggcgctgttgccgaagtaattaatcacggaacagcaagaaatcctaaagaagctgcacagttttcgatggaagcaggcgttgatttagaaatgatgacgacttgttatatccatgaattaaaaggtttaattgaagaaggcaaattatccgagaaccttttagatgaagcggtacttcggatgttaaatttaaaaaatgatttaggactatttgaagatccatatcgcggattaaaaaataacgaccgcacaaaagacattttaaccgatgaaagtcgcgggaaagctcgagcagcaggcgttgaatccgctgtgttattagaaaacaaaagccgattacttccactggctaaagaagcaaaaattgccttggttggtccgcttgcaacgtcacctgatattctcggcggttggaatgtatacggcgaagaaaaagatggcatcaatgttgaaacagggttacgtgaagtatttgaaacagtcgaggttgtttcaacggagtacactgaattgtcggaagaagacaaagtggcagtgaaagcggcagtacagaatatggatgttgtcgtacttgcgctaggtgaaaaaaatgaatggggcggggaagcaggaagtcttgctactattcgtttaccagaagcacaatatcaattagcgaaattcgttcaaacactaggaaaaccagttgttattacattatttaatggtagaccgcttgaagtgaaagagttagcagaatctagtgatgctcttcttgaattatggttcccgggaacagaagcaggtcgtgttactgcagatttgttaagtggtgcaagtaatccttccgggaaattatccatgtcattcccgcaaacaacggggcaaattccagtttattataatcatttacgcactggacgaccacaaacaccggaaaataaaggcgaacgttatgtgtcgcattatcttgatattccaaatgaaccattttatccatttggttacggaaaaagttatagcgaattcgagttaaaaacaagcagtcttccgaaagaactaaatctaggcgaatcactacatgtagaagtaaccattaaaaatattagtgatattgctgggaaagaagtaatccaagtgtatttacaagatgtgacagcgagcatttcacggcctgtcaaagaattaaaagcttttgaaaaagtggcgcttcaagctggcgaagaaaaaacagttacatttgaattaacaagcgaggcattttcattctataaccatcaacttgaaaaagtgcaagaaccgggacttcatcgtgtttttgttgggactagtagtgaagatgtagacgtttttgaagtggaagtgggtggatatgtgtgacaatgttaaaagaaattaaaaaagcggatttatcagccgcattttatccgagcggggagcttgcttggctaaaattaaaagatattatgctaaatcaagtgattcaaaatccattagaaaatcgcttatcgcaaatatatgtacgcgcgcatgtaggagataaaatagaaatttatccactacttagcagagatgctgaagttggttttaatgaaaacggcgtggagtatcgcggtgtagttggaccatttcgttatagcgtgcaaatgcattttcatacgcgcggttggttttatgatgtcacagtggatggtgatcttgagtttgatcttgtttacttacaagacttggggcttgcagaacaagcggcagtgagaacaaatgaagcttatatgtcgcaatatattgattatcatgtgacagaaggcgcgactggtttcactgttcaagcacgtcaaaatcaacctcaaaatgagcgttttccagcagttcaaattggagcattaacgaaaattgtagggtatgcaacagatggttttgatatttatgggactaattataaactgactagcgaactagctaaccttaaggaaaaatcattgccaagccgagtctaccaatatgaattcgctcaaatctccttacaaacagagctatttactaatcacggtgaaacaatcttttacgggtatgcaacagaaaatcaaccaaaagcatctggagcaccattcgaaaatttagccgaactaaaaagtaatatttcagagcaaccttatcaaccaagtactaaagccatattaaacaaacatataggaacaccaattaccggcgaaacaatttctgacagctggcttcaagagaacttcccagaccggattcaagaagaacaacaaaacggcgcactgctttcctttttcacaccaaactatgcacatgtagtgatgcgcgaaaaagaagcagaattagaacgcccgcatggcagtattttgcttgataaagtcgatgtgttaaatccagaagcgactctttcagcaacaacgtacatgtacggggcatttttatcacaattagttgctggaaatacgaatatgaacaaatggaatagccacgcgcgtaatccgctcaatattcttcaaacaagcggattaagaatttatatcgaattagattccgaacttcgactgctcggcgtaccgtctgtctgggaaactagtacgaattactcaacttggtattatcagtggaacggcgacctaatcacggtacaaaccaccttaactgctgatagtaaagaggcattcgtcaccgttcattcggaaaaaggtcattcatataaattagtcttaacaaatcaagtaactatggggacaaatgaatatgatactaccgtgaaaaaagaaatcaaagacggaatcgtcacttatttcccagcagaagactcgccgattttagaaacctatccggcacttcaattccgcgtagatggaacttataatgaactgactgacgaacgttattttgcgaaagattacgtgggaacagcgggtttggatgtgtttgtttttgaaccaagtgataaagctactttccatgttcaagcaaaactcagcgatgaattctcgaaaccaactgaggatttagaagcaaacaacaaagtaattcgcgctagctatgacgaattaactgctcagttccatttaaatcatcaaagtacaacagcggagaaactgaatttaacggtttattggtatgcgcatcaaatgttggttcactatgcttcacctcatgggttagagcagtacagcggagcggcttggggtacgcgtgatgtgagtcaaggtccatttgaatttttccttgcaacgggcaataaggctgttttacgtaagctagtgttgaccattttttctcatcaatatcaagatactggtgattggccacagtggtttatgtttgataaatatacatcgattcagcaagaagaaagccacggcgatgttattgtttggccactgaaaattattggtgattacttggaaatgagcggggatgcagggattttagaagaagctattccttttgttgaccgcgaatcgaaaacctttacgaaagagcaaggaactcttcttgaacacattgaactcgcagtgaaaacgatcgaagcacgctttatgaaaggaacggctctttctaattacggcgatggtgactgggatgacacacttcaaccagctaatgcccagctgaagaaaaacatggtatccagctggacggtcgcgctaacttatcaaacatttaaacgtttagctgcatttttaccagtaggtgagaaatacgaaacattagcaaaaaatgttcaagcggactttgcgaaatatatgacaaatgataccgatgttattccaggtttcctttatttagaagaaggaaaagcacctgtatggatgattcacccagaagacaaagaaacgaatattaaatatcgcttaataccactgacaagaagtgtaatttctgaattagtcgataaaaagcaagccagtcgtaattttgaaattattggtgagcatttacttcatccagatggcgtaagattaatgagcgagccagcgcattatgctggtggtgtaagtactcattttaaacgggcagagcaagcagccaattttggccgagaagttggtttgcaatacgtgcatgcgcatattcgttatattgaagctttagctaaaattggcgataaatccgcttggcatatgcttgatgtcattaatccaatcaatattaaagaagttgtcccaaatgcggcacttcgtcaaagtaatacttatttcagtagttctgatgcagcgtttttagatcgctatcaggcgcaaaatgagtttggtcgtgtgaaagaaggcagtattccggtgaaaggcggctggcggatttactctagcggtccaggaatctatttacatcaattaataagttctgttcttggtattcgtcaaacggaagatgcgcttatttttgatccgattttgcctgaagaattagatggattagaatgtcatattgaactagataattatccgcttgatcttactttcgaaagtgcggatgagggttctattgtcgtgaatggtgaaaaacaaccagttgaaaatggagcgaatttgtaccgaactggcgcactcattttacctaaaaagaatttaacgacaaaatgttcacaaatcacgattaaatttcaaaaaaataaccgtctctaaggttgttttgtgtataataaaagaaaacagaaaaggatgcgattcacgtggtaggaattaaagatatcgcgaaaaaggcaggggtttccatttcaacagtatcctacgcgcttaatggcagcccgaaagtaaccgaaaaaacgcgaaaacgaattatgaccatcgcaaatgaattgaattatattcccaatatggcagcacgaacgttaaaaacaagagaaacaaaaattatcggcgtttatttaacgaattacggcgggattttttacgggactttacttgaaggtttaacgaaaacgctatacaaacatggatatgaactcattgcatgcagtggtacgaaaacacaccgatttttacccgagaaaatgattgatggcgctattattttagatgcgaatttcccgtcgagtgaaatcattaattatgcaaatcgtggtcataaattagttgtgcttgaccgcgaacttactcatgagaatgtgtgccaagtcttgctagataataagggtggtgcaacacttgcgattgattatttatctactaatttcaaaggagacttttatgtaattacaggtccagaagattcttatgatgcaagggttcgcctagaaacagcaaagcaagaactggctcgttcgaatgataaaaaagtgcatattattgaaggcgatttttccgaagagagtggcgaaaaagcagccgcaattattgccgaaaactggaaagcacctgtttccgtctttgctttaaatgataatatggcgattgggatgtatcgatattttgctggaacggatttagaaattggcaaagacgtgcgaattattggctttgataatacggatattagcgaatatttagtgccgcgcctagctactatcgaatactcgaagtacaaatggggagcagtggctgcggataaacttgtcgaacttctcgagggtgaaaaagctgaaaatgaaataatctatacaactagaatcagtggtccatctgtttcaaacagttagtacgcttttttccttattttaaggtatacttaagataaaattaaaggagctgttggctaatgaaactaggaattatgggaacgaactggattactgattcttttattgaaggcgcgattaattcaggcgaatggaatttaactgctgtttattcaagaacagaagaaaaagcacgcgcatttggagaaaaatacggcgagttgacttatttcacagatattgaagaaatggggaaatcagatgcgcttgatgctgtctacattgcttctcccaatgcgcttcattatcagcatgcggttagcttactgaaaaataaaaagcatgttattgtagaaaaaccgattttttctaccgtagcagaattagagcatgcgcaccaaattgctcgtgaaaataatgtctttttatttgaagcagcacgccacattcaagaaccaaacttcaaacgattacaagaaaatatcgaaaaagttggcacaattcacggcgcaacacttgcttatatgaaatattcttccagatacgatcaagttttaaacggagaagaaccaaatattttctcattgaaattctcaggcggatcaatcgttgacctaggtgtctatccattatattcagcgattacactattcggtgaacccattaaagcaacttattttgcaacgaaattaccaactggtgtagacggacttggaccaatcattcttgaatatccatccttcaatatcactatcattcaaggaaaaaattcacaatccttcttaccaagtgaaatctacggtcaaaaaggaacactaattgtcgatccgctgacaggaattgaaaaaattactttttatgataatgcgacaaaagaagaaacagagctggctggtccagttgtcgctaatgatatgcaatttgaagctgctgagtttgcaagaattatcgaacaaggtgaccgagatacatacgaatacttagccgatttaagcttaaaagtattacgtgtttcaaacgaactacggcaccaaaacgatatttggtttgacgcagaaaaataattttgaagaactaggaaaaagctaccatgctgattcctagtttttttgtgcttgacaataaatgaaattcaagtgtactatttacttaatacactagttccgtttaaaaaggaggtaacaatgaatccgacttttcatgcagataaaccaatctatagtcaaatctctgactggatgaaaaaacaaatgattacaggtgaatggaagggtgaggataagttgccttctgttcgggaaatgggcgtaaagcttgcagtgaatcctaataccgttagccgcgcctatcaagaattagaacgagcgggctatatttatgcaaaacgagggatgggatcattcgtcacttccgacaaagcactttttgaccaattaaaaaaagagttagcagatgcaattacagaacgctttttggaagaagcgaagagcatcggtttagacgaccaaacagcaatagaattactaataaaaaggagccgaaaccatgaatgaaaacctaattacaattacgggattaacgaaaaaatatcgaaaaagaaaaccattaaatgacattaacctttctcttcaaaaagggaaaatcatcggccttcttggacctaatggcgcgggaaaaactactttgttaaatgcaatgtcaggtctacttaaaccaacatctgggacaataaacttagcagaacacagcagaattgcctatctgccaagtgaagattttctacccaatatggttatccgcgattattttcaaatttatcgcagttttttttcggattttgaccaagaaaaagcaaaacaaatgattcattcacttggaattaacgtaaaagaaaataccaaatacttatccaaaggtaatgctgcaaaagtaatgctggcacttattttatgccgagatgtagacctttatttgctggatgagccattttcagaaattgatttgatttcacgtgatgacctaattaaaagcatcgcaacgtttcttaaagaagatgccacacttgttgtcacaacacacttaattcaagatatggaaatgatgtttgatgaaattatcttcttgaaacgaggcaaaataatcgagcaaatagacacagaaacacttcgggaagaaaacgggaaatcagtggtggattactatcgggaggtatttggacatgcttaaagcacactggaaattagaatggaatgcgcatcgttacatattttttgcaacttttgttggttggctgatttgtttacttattggtcttttttctaaattaggaaatggcttatcagagccgcttgtaatggagtcagatatagatggagctgtatttgggtccggcgatggtgttttcatagctttaataggcattgttggtgctagttggttactcatttggttacttttatttttggcagcagctcgatctggaatttacgatgaaaaccgttatttgttttttcaaacagaaacacctatttggaaaatactattgaacaaattaatcatcgtcttaatcgagacggctattctaacagctggagttcttgtgattataattagcttggggataattggaggcgcggagatttctttttcagtaggactaactattatttttgacacttttttagcgataggacttaatactttttctttcgtctgtatcctttttctagcaacagctttgagtatggtgccagtcaatggtttccgtgttagttttattggtgcattaatctactttgtactaattaatgcaattcaagtatccattggaacaaattttttatctaaaagtagctcagaaatccatttttattattcccttttttcaagtgttcattttaattttatccagatgggttttaatcttttgatggctcttgtttacttttttctagcaacaaaaattctaaataaaagtgcagacttgcagtaagcatggtatgatacagagaagaactaataaaggagtcgggtcatgacagaatcaaatatcccaagcttttgggcggaaaaatggaaagaacatggttatgaaacgccaactgagattcaaagtgcgatgtaccaaccaatcaaagacggcgcggatgtactcgcagtatcaccaactggaacggggaaaacagtcgcttatgcactgccaacccttgaaaaaatagaagcaattccaaaaacacaatggcttgttttagcgccatctcatgaattagttatgcaaatcacggaagtaatccgttcgtggttaccaagtgatgaactgacagtaatctctttaatcggaggagccaatgtaaaacggcaaatcgaaaaattaaagaaaaaaccacaaattattgtagcctctccaggtcgtgcacttgaactaatcaaacaaaagaaaataaaaatgcacgaaattaaaacgattactttagatgagtgtgaccaattacttcgccaagagaacttcaaaagtactctagaaatagttgaaagtgctgtgcgcgatcgtcaattgacattagtatctgcaacaaaactcgaaaatcctgaagcctttttcttacaaacagaaaaaacgccagtgatgcttgaagtaacagcgaaaccagaagaattaacaaacgtagagcatttatacatggatgtagagtcacgcgataaagcgactcttttacgccgaatttctcatattaaagacatgcgcggcttggtttttgtgaaagataaaccacgtatggaaattttattagaaaaactacattatgataaagtaaaagcagccggaattcacggcgaaattcgtaaagaaaaacgcaaaaaatatttggacgactttaaaaaaggtacgttaacttatttaatcgtgacagatgtagcggcgcgtgggctagatatagaagacttaccatatgtcatccattatgacttagcagcaagcgaaaaagagtatacacaccgctctggtcgtacaggacggatggggaaaactggtacagtaattacttttgccaatcctcgtgaaatcagaacgttaaaacaatatttaactatccatcatctaaaagggaaacaagttcgtttttatcaaggaaaacttctcgatggagcggttccagaaaataaaattgctaaaaaagcaagcagacctccaaaacaagttcaaaaaggcaaaaaagatgaaacgaaaaaacctttccgaagcgaaaaaccaagtggaggagcgggaagtcgtaaagaaaaacctactaactcctctaaaacaacacggaataacaaaccaaataaatttaataaaaaaccaaataattttaaaaaatcataagctgtcgcgaatgtttttctctcttcatagattgaaaagcattcgcacttttttttacttaatttttatcgttgcgagtatgctatttaaaaaggtataatggaaacatagagttttaaaaaggagtagagtagatgtctagtagaaaagaagaagtcctccaacttctaaatggaaaagaagaaaaagtatctgctgcagatgtcgcagaattgcttcaaatggaccgagcgaacgctagtcgttatctaaatgatctttttaaagaaaaaagaatagacaaacttcctgggaaaccagtattttatcaggctttaaaaactgcttctaaagtagaagaagtagcagggagcttccaagagtccgcatttggaagattaattgggtcggaagatagtttgaaagtaagtatacaacaagcaaaagcagcaatactttatccgccaaatggacttcatagtttgattttaggtcgaactgggacagggaaatccctttttgcggaatgtatgtaccaatttgcgaaagaatctcaaactatcccagctgatgcgccatttatatcctttaactgtgccgattatgcgcaaaacccgcaacttttattcggtcatatttttggtgttataaaaggagcatacacgggagcagaagaaactcgtgaaggtttactaaaaaaagcggatggcgggattttatttctagatgaaattcaccgtttacccccagaaggacaagaaatgctcttcactttcattgataaaggtgaatttcggccacttggggaaagcgctaacgttcatcatgcgcaagtgcaaatcattggtgcaacaacagaatcaccagataacttcttactagaaacgttcactagacgtattccgatgacaatcaccttgccatcacttgctgaaagaaacttagaagaacgttatcaattaatcgagtttttcttaaaccaagaagcaatcaggctgcatcaatccattcgcgtgcaccgaaaagcacttattgcctttttactttatcatgcaagtgccaacgttggtcaattgcaaagagatttaaaactagcgtgtgccaaagcctttttacattataaaacaaaaacagccaattatattctaatcgaacaagatgatttacctattcatgtccaaaaaggattactacatttaaaagacgaaccagagaaattaaaccgcttaattgatgttaataaagcgatttttaaattcgttgatacgagcgatgcctctgcggaagtggaagatgtgcacgatgtttaccatgccatccaagaaaaagcagaccagttaatgaaagaaggtaaagaccaaagtgagttagaagaagcactttatgtcgatgtggatcaatatttccacgattacatggtccaattacctacccaccaaacagccaaagaaattatcgcgccagcagtttgggaattaacagaaaaagtgtacgcaatggcagaagaaaaattaaatcgtaaatataatgaaaaaatgaaattcgctttttccttacatttacaaagcaccattgagcgtgttcgtgaacaaaaacatattattcacccggatttaaataatattcgtaaaaaatatccaaaagaattccaagtcgcaattgacctatccgctttaattgaacaagaacttagcattgaaattccttttgatgaaatcggatttttgacaatgtttttgacagaggaagtagtagatacagcactttctcaggaaaatcaagtcgaagtaatagtcatgatgcatggcaggtccactgcaacaagtatggttgaaaccgtgcaagagttactaagcattgaaagcggaattgccctcgatatgcctctaacagttgaagtgaaagcgatgtatgaaaaactaaaacaaaccgtcgttaaattaaatcctgttaaaggtgtgttgatactttctgatatgggttcactcacttcatttggaaatatccttacagaagagctcggcatccgcacgaaaacggtaacgatggtcagtacacctgttgtacttgaagcaatgcgaaaagcatctttaggtcgaggtttagaagatatttaccaaagttgtgagcaattatttgaaaataaatataaggcccatgttttacgagctaagccagtcaaaaatgctgtaatctttacttgttttactggtgaaggggtagccgaacaactgcgtaaagtcgtagcaccaattatcgacgaaacgaaaatcgaaattatcgtgttacaattcttgcataaagaagctttcagagagcggatcgatcaactgatggaagagtataatattttagcaattatgggttcagttgcttttgaatatcgcgacattccattctttagcgcgcttgaagtactatcagaaggcggtttaggaattgtttccagaattttaaacgatgaagtaccttatgaaaaattaatcgcctcattagaaggaaatttacaagccgtgagttctgctgagcaacttgtttatttcctaagaaaagtgatttcagaactacagctgcaacttaatgtgattcttgaatctggtgtagacatcggcatgattctccacttggctttccttatcgagcgtgtcaaactgggcgcggtggatagagagttcccggatttaaatgaatttgctaaaaatcatatggttgaaatgcagattacgcaacaaatgatggaaaacgttgaaattgagtatgatatcgtcatcccgcaatcagaaattgcttatttaactcagatgatgctctctaatcaggtggaagttaactagaaaaaacaacctgccaagtgtgtattgtcttacacacttggcttttttacttgtgtaagtggaaagttcgtacagtagcaacttataagaagaaaagttggcacatatcttgcatattatatatacgtgcagcttttcaaactaggaggtttattaaatgaaaaacatcatgttagtttgttcggccggtatgtccacaagtcttctcgtaaaaaaaatgacagaagctatcgaaaataaccatgtagatgccactgtaattgcagttgcagaagctgattttgataagtataagggcaatgtagatgtagttttacttgctccacaagttcgttttttagagaagaatttgaagcgggtactggatccgctgggtattccagtttcaatcattaatggtattgactacggaacaatggacggcgaaaaagtgctaaatgatgcactagcaatgattaacaaataacctcgagttcgatactgcttgaagaggaaaaaagacacagttttgataaatgaaaaggatgtgtaaacaatggaattagaacaaacaattatgcaattaatcgtacacgggggtaacgccaagagtgacgcaatgttagctatcgaagcggcaaaaaaaggggattttgacgttgcagatgagcaaatcaaaaatgcagaagcggcactacttgaagcgcatcattcacaaacttcattaattcaaggagaagcgcgcggcgaaaaagcagaagtttctttactgttagtacacgcacaagaccacttaatgaatgctattacttttaaagatttagcaaaagaaattgttgatttataccgttctaaataagcttttgaagggatgatttaaatgagaaaattaggaatatccgtatttccgcaacacgtagcgcttgaagaatcattagaatatattgaaacagctgcaaaatatggttttagccgtattttcacgtgtttaatttctgctaatgacgaagcggagtttgctaaattagaaacaatttgcaaacgcgctaaagaactaggatttgatgttattgctgatgttgatccgactgtatttgaatcgttaaatatcacttacaaagaattagatcgtttcaaagaacttggactagctggccttcgtcttgatttaggattctccggttcagaagaagccgcaatgtcgtttgatgatactgacttgaaaattgaattaaacattagtaatggtactcgttacgttgaaaatatcttatcttaccaagcaaacgtaggtaatatcattggctgtcacaacttctacccaagaaaatacactggtctttccagagaacatttcttacgtacaagtaaacaatttaaagatttaaacttacgtacagcagctttcgtttcttctaacagcggcgaatttggcccatggtttgttgtggacggcggacttccaacaatggaagaacatcgcggagtagacattactgttcaagcaaaagacttatggaacactggcctgattgatgatgtcattgtagggaacatgttcgcttcagaagacgaattacgcgctttaagcgaattaaaccgcaatgaattacaattagcagtagagtttttagacggtgcaactgacgtggaaaaagaaatcgttttaacacaaaaacatttcaaccgtggcgatgcttccgagtatgtgctacgttcaacaatgacgcgtgttaatttcaaacaattcgatttcccggcacacgacacaaataccattgcaaaaggcgacgtgactatcgataacgacggctacgaacgctacaaaggcgaaatgcaagtagcacttcaagaaatggaaaactccggcaacaccaacattgtcgcacgaatcgttccagaagagcgttatttacttgatacaattttaccttggcaacattttagattggttgagaagaaataaaattttaaaaaagcagaaattctcttttatattagagggtttctgttttttagtatttattttttgtgaattatacatattttttaatccataaatgtgtattttaacactttgtatttgtgatattttaaaaagaatagacggataaagaaatttatattacacttaacttgtttgagcggttattccatttagaaatgaatgtgaataataatacataaataggagacgatgaaaatggatagtgaaacactattattagatgtaaagaaattaggggaaagagtatctgcgcttaaggattcgatagctacagaagaagcgacgaaaacatcattaattatgcccttttttcaactgttaggatatgatgtttttaatccactcgaattttcaccagagtatattgcggatgtagggataaaaaaaggagagaaagtagattatgctattttaaataataacaatcccattatcctaattgaagcgaaatctattaaatcagatttaaaaaaccatgattcgcagctgtttagatattttggaactacaacagctaaattcggtattttaactaacggtaatgaatatcgattctatactgatttggaagaaccaaacaagatggataaaacgccattcttttcctttgtgcttacagaaataaaagatgttcaaatttctgaaatttttaaattccaaaaagaaaattttgatgtagagaatatttctaaagcagcttctgatttaaaatatcttaattttgtcaaagaatttttaactaaagaagttaatgatccaagcgaagaatttgttaaatttattcttggcgaaatttatgacggaataaaaacaaaagtaattatcgataaattcacacctgttgtaaaaaggggatttcgacaatttattgcagatcaagtgaatagtaaactaaatgctgcacttaatacatctgtttcagtagaagagttagaagttcctcaagtagaagcaaatgctgaagaggaagaagatattattacaacagaagcagaaattgaagcattcacgacaactaaattattattgaaagataccattgatacatctagaattttttatagagataataaatcgtacttcaatataattatagataacagtataagaaaatgggttttaagattatacattaataatgcaagaacctattttgtaataaatgacgaagagaaaactacgatagaaattgttgatgtgattgatatttttaatcatgcagataagattattccagtagtggaaagatacttataaattgatacaggtataaataataaggcacatatagggtggatattttatcttagcattcctatatgtgtcttttgtattttaattatttcccaatcaacccatacaaaaacaaatgaataatctccgcttgtttcttctctagctcttcttctggaattgtcaaacccaatccattaatagaatcaatgaaaagttggattacatcatcagaaatgtcgttattgattacctttgctttttttccagcggcaacatattccatataaatatcattttttaacttgttaatattgtttactaaaagtgttataaattgagaatccttgctagcttctgtggatataaatttacttaaagaaacattgatttccgcatgacaaagttggatggcgcgtgttaatttttctgtaaaagtaccttcagaaactaatatttcttcggctaaagaaatcgtatcttgcataatgactttggcacattcagcaacgagagcttccttatttccaaaataattatatatagaaacctgggagaccccggcgagacttgctatatctttaatactaacttccgaaaaaccagctttcccaaatagcgttaacgcagcatgagtgatagctgttttctttttaagcgttcttttctcgtaattattcattacacacatcctccatttttatgctagcaataatataccataatttcttccattttgaaatattagcacctatatttcaaaataacttgactttaatagccgaattatcatacaatagttttgaaatatggtgatttatatttcaaaactatatatcgaaatacgaaaggctatgaactcgtgaagggaatgtaactgcgatgaaaatgacaaaaaagaagaaattcactttaactattcttgggggagtactcgtgttaagttttattttatataagccgttgattaactatttaagtggtcaagctgccaatccacgcggaattattggtgaaattactaccaaaatatggtcatcgtattttgaagatttgagtaaatggacgattaataatacagaaatggcgggcgttacaaaagttttagatgttggttatgggggaggttccaatgttaaaaatctagtgaacttagatcagaatctaacaatttatggtatcgatatttccaaagagtcctataaaacagccagtgctttaaataaaaaagccataagtgatggaaaagttaagctaactgtagctgatgtagcggatatggattatagggaggagtcttttgacttagtttatgctatccaaactcacatgtactgggataatctccaaaaaggatttgaagaaatctatcgggtcatgtcacaagagggtgttttaatactgtcgtctgaaaaagataaaattgattatcatatggacgaatataaaacaaccgcctcgctaacagcactcttaaaagaaattggttttagggaagtcgtggagaaagagaaaggaaattgggttttgtatacggtcaaaaaataatagtttcaagattagtttcgaagtaaagactgtaaaaagccgaaagccttgatttctcaagagttttcggctttttaggacgcccatacgcggaatcgaaccacgaactagcccttaggaggggcttgttatatccgtttaactatatgggcttttgaaaggcaaacaacagaaataagtttaccagaaataaagattaagagcaagataaataagcatttgaaaaagcgtatagaatgccttttcatatgcttataaaatatcaaattttagctaatttatctacaaaagcaagggatctgcccgtaccaattgcgacagattcaagcggacttggagccatatgtacaggaacatcaatttcttgcaccagccagtcacggaaaccttggagaagagatccgccgccacttaaaataataccacgatcaacaatatcgccacttaactcaggagggcacatttcaagggtatttcgaattgcttcaagaatacgttgcaatgtctcttcaagagcgctttgtatttccgtagaacttacttgaattgtttttggtaagccagtgagtaaatcacgcccacgaatatctgctgtttgagctacatgttcaattggtgcaaaccctaattccattttaatacgttctgcagttgcttgaccgattaaaaggttatagtttttacggatgtattgaataatttcttcatccatatgatccccaccagtccgaacggaagtgctagaaacaacaccaccatatgaaataatggcaatttcgctcgtaccgccgccaatatccacaataacattcgcaacaggctcagcaaccggtaaatcagccccgatagcagcagcaacaggctcttcaattagagcaactgaacgagcaccagtggatcttaccgcgtcagaaatagcgcgacgttccacagaagttgctccagtaggtgtacaaactacgacatttggttttctaacgccgctagttgaaattcttcgcataatttcgcgtaacaatccgcttgttaaatcaaaatcagcaattacaccatctttcattggtctcacagcggaaatagaagttggcgttttaccaatcatttcttttgcttcatgaccaatcgcaagtaccgtaccatcattcgtatttagcgcgaccacagaaggctcattcaagataattcctttttctttactgtaaactaaaatattcgcagtacctaaatcaatcccaatagttgttgttccaaacattctcacacctaactttctattaaaaataacgagtcaattctaggtgtataaataacagtatagactcttttcaccttataagcattatttaaacatgcttgacatcaaaaggtaatttaaacgcggaataaagctggtgttttagccatttcgtaaaaaaatcgtaaaaaaagtaatccaatcaaaaaacgactatccatccatagatagtcgttttcattaggaaactttacgttgtttttcaaattccgaatacatataataataaattaatccactaacgagcgccaaaacaccaataattgtaaaagttccagtgtagccaattaaagtagaaagcgtaatcgcgagtggggcaataactttaccaagcgtataacggagaccagcagcagaaaaatacattgctcgcttatcttccggagctaattgggatacaaaggtttgttgtaaaccaactgtcatcagttccgcaaagctaaagagaataattgcgcaaatcgcaccccacggaccagtggaaataccaaacaagaatatggcaacagcataaaggaaagacgaattcataaagacaaatttctctctaaaatggctcatccagcgagtaacaacaactgttaaagctgccacaaagaacccgttgatagaaacaattacaccaaacagctgctccccagtaaaatgaaacgcgaacaagttagatgcaccgatgacttctttaatatatagcgggaatagtaaatccagttgcataaacgactgagaaacaataatgccagcaataatgtataagaagaaaatcttatccttaaaaataactttataatttttaagttgctccaataaaacagctccaatacttttccgaacaacttctttttgcaaatcagggttaactaaaagtggtgctgtttcatgaccaaatttttgtagtaaaaagagtaataataaatccgcgcaaacaatcgcaagtaatgtttcagtcgtaaaattataaaatagtacagaaccaagaatcggtccgataaccaccgcgatgttaatcatcatgtagaaaacagaataaatatgtgtccggtgttcaggaggcacgacatcagcaatcatcgcttgactcgcaggctgataaaaagccataaaaacactggcaatggcaaaccctgcaaaacttaagtaaggagaatccacaacatgaagtgcacctattgcaaaaacaagaaaaccgaagccttctccaatgacagaaatactcatcatccgttttctaccaaagttatcagcgaagtaacctccaagtaatgccgtaaaaacagctaacacttgcgaaataatcagtagtaaacttgtaagctctcgtccaatactttcagaaaaataaattgttaaaaaggggaagaccatccaaaaagaaatatcgagtagtgcttccccaaaaagccttacttttaaattgatgtcccaagttctaaatttcatctaatgcacctcgctctcttctatgaaaaataacaaacgaaaacccttgaaagcaaaaagctacaagggttttacgcaaaaggtataaggtttaaaaaaggattagaatgcccaatcacctttacggaaaacaggaacaacttcaccagattcggttacaccatcaatgtccatttcagaagaaccaatcatgaagtcaacgtgtgtcaaactattgtttacaccagcagcttctaattcttcgcgagacatttcttcgccacctttaacattaaacgcatacgcactaccgattgctaggtggttagatgcattttcgtcaaatagcgtgttgtagaataaaatgccggattgggaaataggggatggatctggaactagagccacttcgcctaaataatgagaaccttcatccgttgcgattaaatcttttaaaatttcttcgccagatgcagcttcaacgccaacaatacgacctttttcgaaagtgattttgaagtcatcaataatatttcctgcataactaagtggtttcgtgcttgaaacataaccttccacttttagtttatccgcacaacagaaaacttcttctgttggcatattggccataaattcatgtccttttttgttcttactaccagcgccaacccaaagatggttttttggaagaccaattgtaaggtcagttccaggagccgtataatgtaaagaagtaaattgtttttcatttaaactttctgctttggcagcaagtgtttgatcatgatttttccaagtttctaccgggttttcggtgttaatacgagttgtttcaaaaatagcttcccaaagtgtttccatttgttctgctggtgttagatctgggaatacttttgctgcccaaccttgtgaagctgctgcaacaactgtccagcttacgacatttgcttgcattaactcacgaaactcgctcattgcgccacccattgttttttggaaagtggcaattttgttgctatctacgccatttagtaaatctggatcttcagatgtaattgaaataaaacaagcgccttctttggcaagttctgttttttctgcaacacggtgaaccggagcgctttcaaaaacgcgtagtggagcatttttgtaacgtaatgcgcctaattcttcatcgcgccaatccataatgacatcctctgcgcctacttcaaaagcatatttggaaataaggcgcactagtggagccgcgtcaactggagccataattactactttctgttcaggttggacgtttacaccaacttttacaatcaattctgcatacttttctaatttttcactaaatactgtcataattaatcactccaatctttttattcaatacgagaattgtatctcaattaatgaggtaaagcaaccacgaggctactgtttttgctatttttaaataaataaaaaagcaagtccgaaaaagaggacttgctttagaattatccttttaatgcctcgacgaaagtttttgcataactttctgcgcgaacaacatcttcttcgtcaggatcaaggtctacttttagcccagcaactggaactgtagcgccttgttctttcagacgagtttcaactaaatcaactgttaagcaatattcatcataaaaagtatcgccagaaccgaaagaagcgcaaactttgccgctaaaatcaacgtcggccatatcttcgtaaaaatcaacaaattcatcaggtagttgaccatcatcataagtgtagccaccgattagagcgccatcatattctagtaaatcttcaggatcaactgaaatacactcttcaatttcaacttcaatatcgtatttttctaattcttcacctaaaatgtcggcaatttcttgtgtattaccagtcatgctggcataaacgatcataacttttgtcattttgcatccccattttctgaattttttattgtttaaaatggcacaaaccagtctaccattttttcaactgatacattctattataaatgtcttcagaaaaactgcaaccttttttccggattactttatttctaacggttttcgagctataatagtaaatagtggaaattttagaagggaatgaaaagaatgattacactcaaatcaagacgtgaaattgatgagatgaaagcagcggggaaaatccttgccgatacgcataaagaactaaaaaaaatcattaaacctggtattactagctgggatttagaagtatttacagatgaatttttacgtaaaaatggcgcaactccagaacaaaaagggtttgaaggctacgaatatgccatttgtgcaagtatcaatgatgaaatttgtcatggttttccgcgcaaacagaagttaaatcaaggcgatattattacagtagatatggtcgtgaactatcacggtgcgcttgctgattcagcttggacttatgcagtaggtgaagtttctgatgaagtgaagcatttaatggatgtaacgcataaagcactttatcttgggattgaacaagcacaagtaggagcacgagtaggcgacattggtcacgctatccaaacatacgttgaggctgaaaatcttgctgttgtacgtgagtttatcggccacggtgttggacctactttacatgaaaaaccagatattccgcattatggtaaagctggaaaaggactacgcttaaaagaaggtatggttattaccgtcgaaccaatggtaaacatgggcgcttggaaagcaaaaatggacgataacggctggactgcaagaaccgttgatggatctttatcagctcaatatgaacacacttttgctattacaaaagatggcccagaaattttaacgtatcaaggcgaaaacgattaattaaactagttagccagatgcatttagaacagaattcgagtaaaaacacttgtagttattacactgttttactttgacgtttttttctaggcatctggctttattttttagaggtggtgacagggcaattgggagaaaaaatggccatctggcgaacgaaaaaaccagcaacaaaacaaaaaatcgtgtcagacctgaaaaaagcgggtattaaagaaggtgatacggttatttttcatgcctccatgtcaaaagcacactggatttgcgggggaccggtggcggtgatttatgcacttcaagagacagttggcattaatggaaatatcgtcatgccagcgcaaactggacaattgagcgatccggcaaagtgggaaaatcctcctgttccagaaagctggtggaaaataatccgagcagaaacgccaccctttgatccattagtaacaccaactcgcagtatgggcgtcattgcggaaacatttcgagctatgccggatgtggcgcgcagttttcatccatatcattcgttttgcgcttgggggaaagataaagaagaaatacttgctcaccagcctctttcgaaaagtttaggggatgattcaccgctcggtaagttatatcaactttcggctaaaatcattttgtttggagtggataacaataataatacttctcttcatttagcagaagagcggtcaaatgtgtttccgcttattgaaaatcaagctgcatttttgaaacaaggtgagattgtttgggagaagtatcaggaaattgattataacagtgaagcgtttatcgcgttaggtcgtacatatgagaaagaacgtgattttcacccaacgacggttataggagcgccaactaaaatttataatatgcgtgatttagtagattttggaaccgattatttccaaacaaaaaaccactaaatagtggctggaatttgttttattttctaatccgacgcaactcttctgcaaataattgcatttcgcgtgggctaaaatttgatttacgtttaattagctgataaatatcagtaagtgcgttataatcaacagagtcaagctcaagattttcaaaaacgccaacatttaccatttttagtttagtagtaatttctgctaacataaaatctaagttttcctgtgaaggggtttcaagattcatttttttgctcctttcaagctaatagacaaaattttaccataatagaagaaaaacttccagatgaatgactagaaaaagggggccttatcagtgtggaaaaaagtagtaaaatatattaaacataacggaattgtccaagtgggccaaacagtaagcgcacgagtagggcgaaatgatgtttctgggaatgcagcacagttagcttattatatgctgttttcgattttcccaatgcttctaatcgcggccactttgctcgcttatcttcatattgataaagattcggtttttaatatgataaaagaatttgcaccagatcagattatggactttttagaagaaaatttaaataccttactaacgcagaaaaatggcggattactttctatcgggattatcgcgactttatggtcggcatctaatggtatgaatgccgtaatgaaatcgctcaataaagcatatggagttacgaataaacggaattatgtcgtacaacgattattatcgatgtttttcactttagcaatgcttgcaacggtgggggcaactttgctattactcgtatttggacaacaaattggaatgtttttaattaaccatttgaatttctcggaagactttcttagtttttggaataatcttcgttggactgttacgctcgtcgttatttttgtcgtctttacctttttatattgggtggcgccaaatagacgtagtacgttaattagtgttctccctggagcgcttttttcaaccattggctggacaatagcttcagttggatttgcgtattatgtaaataacttcggcaattattccgcaacatatggtagtatcggtgtgattattattttaatgttgtggttttacttaactggtattattttaatgatcggcggagagctaaatgcaacacttgcaatccgtaaaaagaaaaaagaactaggcgaaatcaattaaaaaacgctaaaactgcagtgagcagttttagcgttttaatttttcatgaatgagttgcatgacgtatttcgcgtcgcttggtttattaatatcaacttcatcaatattaataacgagtgtatcacttttatcataagactcaaaccagctatcgtagcgactgtggagatgcttatagtaatcaagtaagccaggattatcaaaggtttgctcataaggacggccacgcaaggaaattctacttaaaacagtatctaaacttccgcgcaaataaatcaataaatccggcgctttttttggcatatatgcaagttcttccatcatattatcaagcaaatcaagatatgtatccatctcaggttccgaaatattaccttcttcaaaattaatttgcgtaaaaagcgcatcctcataaatgcttcgatcaagcacattattttgatccgttaatgcagctttaatactgcgaaaacgggtatttaaaaaatatatttgtaaggcaaaagcccatctttttgggtcatcataaaacatttcaaggatgcgattatccttaatgctttcataaaatgcctttgttccaagttcatttgcaattagctctgtataactacttttcccagcgccaatcattcctgctaaaacaatcactttatttcctactccttccataaaacgagtagcctcctttttggtcgactatctgttcattatactactaatttgcttaataaggagattttttgtacgataaaagagaagaaatgagggataatgatgacaaaaccattaaagctagtttataccgaaaatgggtttgacacaggaagttttttaattgatgataaaatgaccgattattcaccagcagatttgatgttgatgtctattgccagttgtagcgccattgtttttcgtaacattttaaggaaaaaacgagtggattttactgatttatgggtagatgcaacaatggaacgtattcctgaagaagaaaatcggattagcgcgattcatcttcattttaaaataactggtactgacttggatcctaatccacttgaaaaagcgctaaaattaaccccaaaatactgttcgatggtccgttctgtcgaaaaaagtattattgtcgatgaaagtcttgaaatcatgccataaactactgacaagtggcagtttttttgttagtattaatgaagacttggaatgatggaggaaaataatgaatcaaaatccagtagaagaaggccaaaagttcccgctaactattagacgcatgggaatcaacggggaaggaatcggctactttaaaaaagcagttgtatttgtacctggcgcaattaccggtgaagaggtggttgttgaagcagttaaggttcgcgatcgctttaccgaagcaaaattaaataaaattcgtaaaaaatctccaaaccgagttaccgcaccttgcccagtgtacgaggcgtgtggtggttgccagttgcaacatgtggcttataacgcccagcttgaactaaaaagagatattgttattcaatcaatcgaaaaacatacaaaaatcgacccagcaaaattaaaaatccgcccaacaatcggaatggaagacccatggcgctaccgtaataaaagccaattccaaacaagaatggtaggcagtggtcaagtggaaacaggacttttcggagccaattctcaccaacttgttccgattgaagactgtatcgtccagcaaccagttaccatcaaagtaacgaattttgtccgtgatttactcgaaaaatacggcgtgccaatttatgatgaaaaagcaggcagtggcatcatccgtacaatcgtcgtccgtacaggcgtaaaaaccggagaaacacaacttgtcttcattacaaatagtaaaaagttacctaaaaaacgcgaaatgctagcagaaatcgaagcagctcttccagaagtcacttcgattatgcaaaacgtcaaccaagcaaaatcctcacttatttttggtgatgaaacgttccttttagcaggaaaagaaagcattgaagaaaaattaatggaactcgaattcgatttatcagcccgtgcctttttccaattaaatccgttccaaacagagcggctctaccaagaagttgagaaagcactcgtactaacaggcagtgaaacattagtagatgcttattgcggggttggaacaatcggccaagcatttgctggcaaagttaaagaagttcgaggtatggatattattccagaatccattgaagatgccaaacgaaatgcggagaaaaatggtatcgataatgtttattatgaagtagggaaagcagaagacgtattgcctaaatgggtgaaagaaggtttccgcccagatgcagtgatcgttgacccaccaagaagcggctgtgaccaaggtttaattaaatcgctgttacaagtagaagcaaaacaacttgtttacgtatcatgtaacccgtctacgcttgctcgcgatttagccttgctagcgaagaaatatcaaattcgctatatgcaacccgttgatatgttcccgcaaacagctcatgtcgagacagtaacattactacaacgacgctaaaccgggtaacttaaatttttagtttatccaattaacaatcgttgaaaataaaattcaatttaaaatgaccgtgacctcaattaatgtaactattaatttacatgataaagacgcttctgtaaaaggagcgtcttttttttacacccaatttatgaaagaaagcgagcattaaatctaactacagaaagccgcaataattgttgtttcatatgtttttaaaataccctataatgaagttatggcttcataaaaaggagtgttatgttgtgacaacgagcaaatatgaaaacgaatattggaaacatattttcgccttacaagattatattgaagctcatccagcagagaatttcacatccgaacaattagcaaaaattgctggattatccaaataccactttcatagaatttttaaagcgttaacaaatgagtcgatatttcaatatacaacaagaataaaaatggaatgggcgcttggcttactaatgaatcgaaaggatttaacaataaccgatgtagcatatgaacttggcttcagcgattcttccgttttttctagggcattcaagaaatatttcgatgtgtctcctatagaaattagaaaacaaaatagcaacaattgcaaagagaattttcttacttcccgctataataagcctgtagatgaaaaacaatataatattccaggcaaagtaaccattactacgctacagaatatacctgtcatctataagagaatagtaggttcttacaaggaattagaactcaccaaccctttgagtgaactctttcaatatggaatggagcatgatttacttgataaagattcatcgtttccgttgacaatttaccatagccatcccgatataacaacagctgataatcagagagctagtagttgtattattattaaacaaaatgttaagcagttagacagtgaggaaatcgggcttatggagataccttctgggttatacggagtcattcattttgaaatacgtcaaaaagagtatccagatgcttgggattttgtttacggaaattggcttccttctagtggttatttgccagcaaactcatttccatttgaagtatatttaaacaatccactggaagacccacttcaaaaacatattgtggatatctatattcctattgaaccaataaactaattagtagggggaaagcatggactatattcaaattgaaaacgcatatattaataacctgaaaaatataagtatagaaatccctaaaaataaatttattgtaattactggaatcagtggttcaggaaaatcaagtttagcattcgatttgatttttgaagaaggtagaaaaaagtatcttcaatcaataggaatggctttagattttggaacagactattatacaaatattaccgggttaagtcccactgtagcagtaaagcaaaacctcatcagacaaagtaatccgcgctctactgttggatctaaaacaggacttttaaacaaattttgtctattattcgcaaatgaaggttcttaccaagatagtgaaagtttttcgttagctaatgatgatataaatcctgatattttttcctatctttcgccaaatgggatgtgttttgactgcgctggaactggtaaacaatttcatattcatatggaaaatattatttcatctaaaacagtgacggtcgaacaagtatttcaacaaattggttcaacaaaaggttatcttaatttactacagagaaaatatactgcttattttcatgaagctttttcgaattgtcccatcgagattcaaaatgaattaatttatggtgtagtagataattactctgggaaaacaagttattgcattgaacgagtattacataatcggtatctacgtaatgaagatgttcagagattttattcacaagaaatctgtgaatcctgtaatggctaccgcatttgtgatgaagctagaatgatgaaaattgctaatctacacttgggtgaaattgccagcatgtcgttaataaaagtaaaagaattccttgataattatatagagatgaataaattgtcagcttttgggacagagttatctcgttcgcttattacaactttaaattcactcatccatattaaactaggacatttaacgatgtatcgagagattccgaccttaagtggaggcgaactacaacgaatttttttatatgaccacttagaatcaaaactagattcactcatctacgtgtttgacgaacctactagcggactacacgaatcagaaaaacaagagattatcgagtcacttcaatcaatcaaagcccatggaaacactgtacttattgtttctcatgataaaaaaataataaaagctgctgatcatattattgatgttggaacaaatgctggagatttaggcggtgaaatagtttatcaaggatcctattcagagtttctgaataatcgccattcgcttacttcaaaatttctagattatgatatgacaaaaagtttcaaaaaaaataagcagaaaacaaaagatacactaagcattagtaatgcaaaccgaaacaatttaaaaaacatttcaattgaaattccgattaacagacttgttggaattgctggagtttctgggagtggaaaaagtacattaatatctaaaacattagtaccactctgcaaagaacaattaaagaacagcgatttcagtaatccaaatatcaaaggaatggataaaatacaaaagataattgaaatatcacaagctccaattggacgcaaagcaaattcaaacccggtcacttatataggtttatgggataagataagagaattatttgcaaaacaacctcaagccgttaaggaaggattaaaagcaggcgatttttcttttaactcaaatggcgcatgcctatcttgtaaaggtagtggggttgaagatatttcgattggctacgacattcaatttagtaaaacttgtccagaatgtaatgggacacgatttaattctaaaaccctgcaagttttgtacaagaaaaaaatattaatgatgttctagaaatgagcgtagatgaggctatctcatttttggaaagttcaacgattgacctatccgtattaaatatccttaaaaaaatagggatggattatgtgaaattaggtcaacctacctcaactcttagtggtggtgaggctcagagaattaaattagcaaaagaaattggaaaaacaagaaaaaaagataccctttatgtgttagatgaaccgtcagcgggcttaagtcaatatgacatttcaaaattgctttatttactaaatgagttagttacaagtggtaattcagtaattgttattgaacatgatctcgatatattaaaatgctgtgactggattatagagcttggcgaaggtagtggagacaagggcggagaagttattgcacaaggaactccaatcgacttaagcgaaaataatgtatctattacagggaggtatttataagtgaataacacgcctatgttgcctccagaaaaaattttaataattgatgaattagtaaagaagaagtactcaaatattagaggactatctatttttcaaaatgaaaatcacgtactagaaacctattatggtcgtaacactaaaaatgataaatttaacgttgcttccataactaaaagcgtcatatccttattaattggaattgcgatcgataaaggttatattcgaagtgtaaacgaaaaagtgatagatttttttcctgaatataaatttactgataacaatgttttaaggaatcagataactattaaaaaccttttaacaatgacggctccatttccttttccaaatatgcgagaacctttaacaagactatgtcggcagaatgattgggtggagtatgcgcttcaaataatggggacaggcgggagaattggaacatttaaatattctacaagcggtgcccatttgttatcagcaattcttacaaaagcaacaaaaatgagtgcacgcgaatttgcaaataaacacctttttgaaccattatcgattgaaacagttcctaatttcccgatgaaatttgatatagatcatgtctttgggaggaaaatgaaaggttgggtttctgaccctttaggaaataattcgggtggttgggggctaacactaactttaaatgaaatgtcaaaacttggacaactatgcctccaggaaggatatttcaatggaaagcaaattattagtaaagaatggctagaagagtctacccgccaagtaaaaaatagttacggatattatggatacctgtggtgggttagagataataaagacgaatatatggcagtgggttcaggtggaaatattatttatataaataaaaataaacggatagtaattgcaattgcttcaactatcatttcgaaacccgcagatagacaagaattaattgataagatactatcaatactatagccagtgaaaggagaaataggtcgttaggtaggaaaagtactgcaaagaaaacaagagggcgggtgagtacatgatttcaggattaagtcatatcactttaattgtgaaagatttgaataaaacaaccacattcttagaagaaatttttgatgcagaagaaatctattctagtggcgatgacacattttcgctctccaaagaaaagttttttctaatcgctggactgtggatttgcattatggaaggtgaatctttacaagaacgcacttacaaccatattgcttttcaaattcaagcggaggaaatggatgaatatatcgagcgaattaaatcactcggcatggaaataaaaccagagcgctctagagtaaaaggcgaaggacgatccgtttatttttatgactatgataatcacctgtttgaattacacgccgggacattagaagaacgcttaaaaaggtatcataaatagcaaatacaggaggaactactatgaaaaaactatttgatgaaacgaatgaatttgaaaacaaatactaccgaactatttggtacggttatatcgaaaatgagtttgaacctgaattaagtaccacaataaaacagctaattcaaagcgatcttgccgaaaaaacagcaaatccaatcgaagccgcgcactgggttttctatagtggaacacaagctggcgatgcaatcggtgataaagtccgctcatccataatggtccgccatcgtgataacgagtttgtcgtccattacaacatgagcgatttccaatttgttaccgtgtttgacgtagcaaccaactttaaaaatcaacttgaacaagatttgaataaataaaaacatcccacctattgttaggtgggattctctttcatccaagttctttccagtgccaattaccgatatgtaaaccttgatccatttcatttgatgtaaaactatcagctcttgcttctgtttttgctcgtgttaatgaagtcgcgcttccaaaactatttgcagtttcgtagtggtactcttgattgttcaagcgaataataatggcacggccagaaggatgttttccaattagtttcaagacttcttcgctccttttttcagtcggttaaatcatttttgtgaaagcaccggcattttgatccaaggcagtagaggcagattcaatttggctaaaatcttctaaagataaaataaggacttcttggctttcctcgacttttgcttcgacacgttctgtaccacttgagatagtattaatttcttgggtgataccgttgacacttttttctacttctttaattgcttcttctacacgacttgaaagtttacgaacttcttcagctacaacactaaatccacgcccagcatcaccagcacgtgctgcttcaattgctgcatttaaggcaagtaaattggtctgagaagcaattccgttaattgtattaataatgccgtgaatattttgtgcttctgtttgcaaatcgtgaagggtatcggtattttcatttgattctttcgtgattgatttcacgagttcaaggagagcttcactgcgcgtttttccaacactggaatgttcttttaaatttgtagccatgctttttaaaccagaggcaaaatcatggacagtttcttctcttctcgtaatatcagttgctatttttgcaactccgactactgtttcttcgcgaataatagggatataagtcgcttcgaaccaaacacgttcgccacgagcgttttttcgttcaattttattttgaaatttttgtccagctagtagatttgtccacatttctttgtagctcgcagtttgtacaaagtctggaaagcataagtcagggtgcgataattgcaacatttcttcttctgtataccccatagcttccgcgaaaagtgcattagcgtaagttacttttttattagtatcaaaacgaattattgctacgttttgaagtaaaccatcgagaaggagagttgcgtcttctgtttccgcattaacattcattaaaaaaacctccattttttagaaaaataatatgaaaataaccaacatcaacataataacacacttatattcgtattagaaggtttatttttttataaaatgggtataataaaaaaatttagcttagtagagttacttgcaatcctgttagaacaatcttataatttagaaaaatacgggagggatagggatgcgaattacgggggaacggatttacttaagaccttttcaaataaccgatgcgaatcaaaaactagcttttcatttggcgaataagtctttttttgcgagctattcgatggagcgagatgagcgcttttatacgatagaagagcaacaagcgcttattttacgattagaagattttgctgcaagtgatgtagagtattattatggaattttcttgaaagatactgatgaacttattggtacaattaatttatttagtattttgcgtgaatcgttacaatccgcatttatcggttattttttggataagactcataacggaaatggatatgctaccgaagcagtacagttaatagtagattttggatttgatattcttggacttcatcgtattgaagcgggtgttatgccaaaaaacgagcgatctaagcaagttcttttaaatgctggatttcatttagaagggctagcggttcaaaatgtgcgcattaatggaacgtgggaagatcatcaagtactagccattataaatcctggagactaaaaaaagccaagtggcgcaatttgcgcacttggctttttcttcttttaacgtccgtcgccgtattcccagttacgaatagcatcgtcttcatcaaaagaaattaacacatcagcaactccgcgaagtttaccaatattttcttctaaacggtctttaatatcatctacttccgcaagtgtaagcatcggatcaagttcgacctcgacatcaacgtgaaacacatcgccttcttttaacacggtaagcacttgtatatcacgcacatctggatcactcattactaattgaccaacagttaaatgcatgctttgatccgattctccaatcaccccagcagcattatctaaaaatacttttccgacaacaataaacatcataactccaattaacatcgatgcaataccttccgcttgatgaaaaggagtgtagtgggaaataatgaccgcaatcattgcaagcaagccgccaccagttgccaccgaatcttccaagaatactagtttagtcgctgcttttgccttaccaagatttaaaatactatctttaaataagctaagaccttttgattctaaaccaacatcatgagcaatttcgtgcatcgcttttacaagaacggaaaactctaaaatagtacaaagtaaaagtaccacgagattaataagaaaaccggttgaacttgtcggatcgatgatgtgcgcgaaaccttctcgaattgtctcaaatgccataataccaacaacaattaccgcgccaagaagtactaagttaaccatccggccaaaaccatgcggaaaacgtttcgtcggccgtttcttacttaaagcagaacctataaatacgaaaaactggttagctgcgtcaccaaggctatgtagcgtttcagcaaacatcgcaatgttccctgtgaaaaaataagtgacaccttttataattgaaacaatcgtattaacaagagctgctgttaaagctgatttattgccttcttttaataaccctaataattctttcatcctagtctcctccacgaatatcattaagaaattgtagcattttttcactcaaaaagaaaataggaactaagaagctttctagaagcttgcaaaaatgtaagtataaacaagctttcttttcaaatttatatctgctaaactggtactaggtgcttattcagagagtctgaaagctgattttgaaacggaaggcgttgggatacgagaatgcaagtccaaaaatgccgtttttttgtattgttactgccagtattatatctcttatatggggtttcacttgcactacaatttgggaataacgctgatttaattaatacgattactaatagttgtatacttttattaacaacattaattttaacaaaactggctaaattaaaaaactggattgatttcatctggttttgtgtatttattttatatatatttgtgctcttacatctagtagcctatatttcgattggtgactttgtaaacagcacgtatacagggaatttccacattcaaaaagaaatgattaatttaataccttttacaacaatagaaaacacattccaacaaacattaccaacgatgccaacaattattcaaataatcgggaatgttttattattatgtccgctgtctttctttctactttactttaaaatcactagtacagcaggaaaaactatacttgttattttccttacttcttgtggtattgaattgctacaatttgctcaaacaacgatgattacaggatttgaaagtatctcacttccaccaaaccgctctacagatgtagatgatattattttaaatacgttaagcggtttaattggtgtcttacttgcatatgcaatcccaccagttagaaaacgtataaataaaagaagatgaatgtaatcgttaaggagacttagttatgaaagaaaagttaatgcaagcctatgcttggttccaaagaaatagtatgatcgtaaaaatagtttttattacctttgtaatggggttcgtcatatttgagattgtcaatattgcgacagggattgattacccatcattaaaggcaaatatcacttctcaaagcccagaacagatatttattatgttcattgtcggcttaattgctgtgacaccaatgcttttgtatgattatgttattgtaaaacttttaccaggaaagttttcgccaattcatgtggttgcatctggttggattacgaatacattcaccaatattggtggatttggcggggtattaggcgcaagtttaagagcaagtttctacggaaaaaatgcctcccataaagaaattttactagcaatctcaaaaattgctttattcctagtatcgggattatcgatttactgtttagtatcattaacaacattacttattccaggttttgctgatcatttcgttaattactggccatggcttctagctggcggtctttactttccgattttattcacgattacaaaatggaaaagtaaatcgttattcgtggacttgccaattaagagagaattaacgttaattgttgcttcccttttagagtggggctttgcatttggctgttttgcaattattggtgttttaatgggagaaccagttgatattttcaaggtatttccattgtttgttatcgcttctgtcatcggtattgcttcgatggttccagggggcgtaggaacttttgatgtagtaatgattcttggacttagccaactcggtgtttctcaggaattggcacttgcttggatgctattttatcggattttctactatattatcccgttcattgtcggtctacttttctttgttcaaaaagcaggaaaacgactaaacgattttttagaaggattaccactactatttttacaaaaagtggcacatcgatttttagtgtttttcgtatatggatcggggctattactgattttatcttccgcagttccaaatgcgatttaccatgtaccattcttatacaaaatcatgccgtttaacttcttgtttacatcgcaaattacaattgttgcttttggattcttactactcggacttgcaagggggattgaatgtaagacaaagaaagcttacattataacagtcatcgtactaggttgcgctattttcaacacgcttgctcgcgtattttcgatgaaacaagcgattttcctaggaatcgttttactatgtttattccttgctagaaatgaattttaccgggaaaaactagtgtatacttggagtaaagtaatcattgatagtatcatttttatcgtatgtttagctggttatattgttatcggtatttataattcaccaaacatcaagcattccaaagaaattcctgactatctacgcattgcatctgaacatttatggttagtcggatttgtcggtgtctttattgcggttgttagtttagttattatttatatctacctatctactactaaagaaaaactcggctcgccatttgaagcggtcaaagtacgtgaacatttagcgaaatggggcggaaatgaagtcagccataccatgttcttacgcgataaactactattttgggcggcaaacggtgaagtacttttctcttaccgaattattgctgacaagatggtaattatgggagaaccaactggaaatatggaaaaaatggaagacgctattgaagaagtcatgacaaatgcagaccgatttggttatcgtcctgtgttctatgaagtccgcggcacaatgatcccttatctgcatgatcacggctttgacttcattaagcttggcgaggaaggttttgtagatgttcaaaactttactatgagcggtaagaagaaaaaaggcgaacgagcgctaatgaacaaattagatcgcgaaggttacacgtttgaaatcattcagccgccttttaacaatgagatgtggaagaccttgcgagctgtttcagatgaatggcttgatggcagggaggaaaaaggcttttctcttggcttctttgatacgtattatttagaacaagcagatatagctcttgccaaaaatgcagacggaaccgtagttggttttgcttctatgatgccgtcgtatactgatgaaatgacttcgattgatttaatgcgatactcaaaagaagctccatcaggcattatggattttctcttcatcaatttatttgaaaaagcgaaagaagacggattccaaacattcaatgcaggcatggcaccactagcaaacgttggtgaaagtaagtatgcgtttctaggtgaacgattggcagggcttgtgtaccgttatagtcaaggtttctatggatttaaaggtttacgaaatttcaaatctaaatatgtaacagaatgggaacaaaaatttgtagcttttagaaaacgaagctccattgcgtttacaatgttacagctaatgattctcgtagggaaaaaacgaccacttgcaaataatcaagtagtgctcgacttcccgctaaatgaagaaatagaaaaaccagattctgagtaaatcagaatctggtttttctaatcaattaagtcatctaaagcttcttgcaacgtttcgaatcgaaattcaaaatgattactcattaatttttctggataagccctctgactatccaaaatggtcattgctcgttcaccgagaatgaatttaatgattttcttcggtactggagttttataaggtttatgcattgttttaccaagtcgctcggcaaatttcttttcttgaacaggatgaggtgcggtaaaattaactaccccgctaatttgttcgtgattaaaaataaacaacattgccgctacaacatcatcgacatgaatccaagaataccattgtcgaccactgccaaatttcccgcctgtatatgtttggaataacttttcaaaaacaggaaatgaaccgccgccagtcccaagtacaagcccaaaacgagcgtaaactactcgaatacctaaatcacttgctgcactagctgtcttttcccattcataaactgtttttcctaagaagttatctgcataagcattttcttccgtgtctagataaatagttgatttggaggaagtataagctccaattgcacttgcattaatccacaatttaggtttggatttcatttttgaaacaatcgataagagtgctgaagtagcttcgatgcggctatttacaatcactttcttcctatcatatgtccatttttcatccatcaaaccagcacctgccaaattaatacaaacatctactggtaaatcttctaaattaggtaacttatcatcatttaaccattcaatataatgtacatttgcgcggttttttagcttttgtcttgttaagatgaaaagctcgtgatctgatttttctaattcatgtactaaatgatcaccaataaaacctgttgcgcctgtaagtaagatatgcaattttatcacctctttatagtcctaactaatttattccctttttagtagtattaaaaccaatttttgcggtatgatagataagagaaggaggcggattatgaaaatcacgtccataagtgtccaacaaaaaaacaaagaacgctataacatttttattgatgaaaaatataattttagtgtggatgaagaagttttagcccgctaccaactaatgaaaggaaaaacgttaactgaggctgatatagaagaaataaaacaagcagatatggtccggaaaggtcttaataaagcaatcaatttcttatcacatcgcgtccgttcggaaaaagaaattcgcgattatttaagaaagcaagaaatggaacctttcgcagtagatgagattttaaaaaaattagctgatatggattatattaacgatgtcgaatttgccgaactatacacaaaaacacaaatcaaaacaacactaaaaggaccgcgaacaattgagcgtgagttagttgaaaaaggtttaacaagagaaattattagtcaagtaatggaagaatatgcaagtgatattcagctcgaaaatgccaccaaacaagcgatgaaaatcatgaaacgaaacaacaaaagtgcaaagaaaatgctacaacaaaaaattatcactgatttaattcagaaaggctattctagcgaagtagcgaaaatggctgcaattgaagctacaagtgagttagatgtggcggatgaagcagacattttacaaaaacaagttgaaaaaacaattcgtaaaaataaacgctataaaccaagcatcgccaagcaaaaaacgatcacatcgctaatgcagaaaggtttttcttatgatacaattcaatcatacctaactgaaaatgaaatcagtttcgaggaggaagagtgaattgtatacgtatttagatgaactaacggcggaattgatggctaaaaatccgcatttagataaagagcaagccttgtggtggattgaaatgctttggtcagatttcgaaagttcctatgcaaaagcaggttacccataccgtggccctgagtacgcagcggattatgttcgccaacaaatcgagcgtcacggtagctttttacatcaagtagaacgaaaagacccaaacaaataggagtgaacaaagtgaaagtaagaggatttgaagtagttaatgaagcaagtagaaaatttccagaacaaaccatatcgctaccaatacgcggcgacaaaggttcagctggctatgatttcttctccaatgaaacaaaaactattgcaccaggagaaaaacatattttttggacagacattaaaagttatatgcaagaagatgaagttttaaatatccacgtgcgttcttctatcggcattaaaaaaggtttattgctgtgtaacggtactggcataatcgattcttcttattatagtaacccaggtaatgacgggaatatcggaattgcaattaaaaatttctcttcagacccagtagaaattgaatccggtgaacgtgttgcacaaggcgttttccaaaaatacttagtagcagatactgacatcgttgcaaacgaatcacgcgttggtggggtaggaagtactggtagataaataaaaaagacccggaatcccgggtctttttttaaatactaacaggtgctagttttttgtataatttttcagttgaaaaaatccaaccagtgtaagatgaaatgatcttcaagtcatcatctaatttaactactgctacgaatgggtaatgcccattacttcgataacgcaaatcagtaaaagtaacataggtgccatctagtttttcttcaatgcgccaattgtacactttggagaatgagatgaaagcagctaggtttttatcttttttcgcagaacgaatgatttcattatcaggaacaggtagccgatcaaatttttcataaatggagatatttcgtttgaaagctcgacctacgtagtaatgatctttggttgtaaccgccacacgccactgaaagaaatggatagtggacgcgataatgatttcttctgaatcgggaattaagttttgaaccgcatgtttgatcatccgctgcgtcacaaatcttgccacgtaataaagtgccaaaataatgtagagcgtgacaaacgtaggaactgctggtgaacctaatagccaaaccgcaatagcaacgacatgagagccgaaaatgaaccaatcaaaagtattgataaatccaaaagcaacccatgtctctttaaacggtctaatagcttgcgtcccgtatgcgttgaaaatatcaacaaaaatgtgtaacccaaccgctataaacgtccataataataaatgaataaacgtggctgctgggaaaattaaatacaaaatggatgaaataagtaatggccaaatggcaagcatcggcaaggaatgcgtgattcctcgatgatttctaatataatcagcgttatttttaagttttaatactgtgtcaatgtcaggaatctgtgaaccaataattgttgctgtcataataccaatggcagcttgagaacttccggcaactaccgggtctacggttgctaacgctccgagtgcaattcccattactacatgtgtgccagtatccaatgactttgcctcctctaaaatcggtctttaaaaatacaagtggtgctgcctgagaaagcacaacactattcaattaagccagctttcggtataatagaaaacggcttaagaatgggtatactattttattccctgtttacattatactacacatccggagtatcacacattagaaatctattagaattacgaggggaaaatgagaaaaatgaagagactaacatgggatgaaacaaaaataactgcttttcaagaagcactcgtttcctggtatgaagcgaataaacgcattttaccttggcgcgaaaatactgaaccttatagaatttgggtctcagaaatcatgcttcaacaaacaaaagtcgatactgtgattccttattttaatcgctttatgactcaatttccgacaatggaaagttttgttaatgcagatgaggcagacatattaaaagcatgggaaggattaggttattactcgcgtgttagaaatcttcaaaccgcgatgaaacaagtaatgactgatttttctggagaagtaccaagtgatttaaccactattttatcacttaaaggtgtcggaccatatacggcaggagctattctaagtattgcatataatcaagcagaaccagctgtcgatggaaatgtgatgcgtgttattgcacgagttttggaaattagcgaagatattatgaaagcatccacacggaaaatttttgaagaagtattgtatcaactaatcgaccaagaaaatccggcagcctttaaccaaggattaatggaaattggcgcgctcgtttgtacacctacaaaaccaatgtgtctgctttgccccttgcaacctttttgcgaggcgcataaaaatggtgtcgaaaccaattacccagtgaaaatcaaaaaaacaaaaacgaaaaccaaagaattactaagtattattgtaatttcagacgatggaaaaatagcgatagagaaacgaccagaaaatggcttactagcgaatatgtggcaatttccaaccattgaaatcgccaaaaaagaaaatgatgaggtagcaaaactacaatttttacataattatggcttagaagtatcgctagaagaggaaccaattgcgcatatcaaacacatcttttctcatttagtttggaaaatggacattcgtgtggcgagacttcggtcagcagttccaaatgaaaactggcatttcgcaacagaagaagaaatgaaacggcttgcttttccagtaccatatcaaaaaatgtggcaagcttggaaagaatttaagggggagtaataaatgaacaaagtagcattagtaacaggaagtagtagaggacttgggagagaaatagccattgcgcttgcaaaagaaggttatgatattgcagtaaacttttcaagaaatcgaaaaaaagcagaagaagtacaacaagaaattgaacaattaggaagaaaatgcactatttttaaagcaaatgttggcgacgtagaaaaagtgagagctttatttaaagcggtagacgaagaatttggtcgattagatgtttttattaataatgcagcaagtggtgtgcttagaccaattatggaactagaagaatcacactgggactggacaatgaatatcaatgcgaaggcgttattatttgcgggacaagaagcagctaaattaatgcaacgtcaaaaaagtggtaaaatcatcagtttaagctctattggttcgattcggtatttggaaaactatacaactgttggcgtatcaaaagcagcggtagagtcacttactcgctatttagcagttgaacttgcgccttttggaattgccgtaaatgctgtttcaggtggcttaatcgaaacggaagcactgaatcattttccaaaccgtgaagagttattaaaagatgccgtaagtaaaactccagcaggtcgaatgattgaaccaaatgatttagtcaatgccgtattattccttgctagtgaaaaagcagacatgattcgcgggcaaactattttagtagatggtggtagaacacttttagtatagtaaagtaaaaaggataaaaattagctatttttcgtaaaaattgttcttttttgaggaaattattccgtttcagcacaatattgtttttttgcagtcttgccttatgttataataataatgattttgatagtacatgaggaaagtaggataaaggatgtacttacccaaagagaaagaaataatacagatcaagagctacaaacataacggtaaacttcatcgtacttggaaaaagacagtggtgcttaaatctacggagaatattattatcggtggaaacgaccacacattagttgtggaagcagacggacgtaaatgggtaacgcgcgaaccatcaatttgttattttcatagtgattactggtttaatgtaatttcgatgattagagaagatggcatttatcattactgtaatttaggtacaccttttgcggtagatgaacaagcgctgaagtacattgactatgacctcgatattaaggttttcccagatggaaggtttcatttgcttgatgagggcgaatatgaacaacaccgtcgccaaatgaagtatccagactcaattgaccggatactaaaaactaatgtagatgtgctaagccactggattttggacaaaaaaggtccattttctcctgattacattgacatttggtatgaaaagtataaagaatatcgttaaaaaaacgagcttggagtttatctccaagctcgttttttgtttattcttcattaacgttaatatcgatttgattttcttctgtatgccgaagtttaaaactgtgaattagtttttctaaataatcgattgtttcttgataagcaaaaacagaagcgataatacgcattagatgatatttatccatcatgtcttcatattcatctttttctgtttcttccatctcacgcaggaaaagttgcattaaatcttgtggatcttgtgctaaatgtgactctacatattcaaggtcgatagaaactttgtcaatataggttagtaaaagttgttcatgtttatctgttaagtaatcaatatgttgtctaattaattcttgtttatctggcggtagttgcaaataatcattttcataacggtgttggatttttaacagttcaaaacctttttgagagcaaagcaacatctgcctataaacagcaattttccgaccttttgaaatagcatttttcttcaggaaagtacgctcttctcggtataatccgtataagttacgcgtttgatttaactgtttttgcatccattccatatctttttttagaagagggaagtctgcggcgtggcgaagatttagtttaatccagcgtacaatctcgctattagtattgtaaatcaactggaaaagagaaacttcatatttcggtggtaaaaagaacagattaacgataaatgcagcaagtaaacctaacataattgtcccaaaacgaatgagggcaatttctaaaaagtcattaccaggagagtccatgacaatgattaaggtaactacagcaagtccaatcgtattctccaaacgaaattgcattaataaagccacacagattatcgaagcaacaccaattaaaataaaatcattaccaatataaagtccgaaaataattgcaatgatggctccaataacgttcccttgtgcccgttctaaaatagttcgatatgatctataaatagaaggctggatagcaaaaacggcggaaatgcctgccagagatggagatggtgaattgcaaagctgggcaataaaaagcgccaatgtgattgcaatacctgttttcaaaattctagctccgaatttcatggaaggttattcctttctatagactatttgagcgggatttttaagttttcccgctcattcttcttctattataacgtttctctcaagtttatacagtaatattacctatttaccttgaaccaatttgccaaaaacagtatcaactgcttgaatcgtttctaaaatatctgcctcggaatgcgcggaagtaatgaaccaagcttcatattttgacggtgccaagttaatcccttcttctagcatacccttaaagaagcgaccgaataaatctccatttgtagccccagcttcagcataattagtcacaggctcatctgtaaagtaaacagtaagtgctccgacaatttggttgactgtaactgcgataccatgtttaatagctgctttttcaatgccttcttttaacatcgaaccatatttttcaaaacgatcataaaggccttcttcttgtaaaacttctaaacaagcaataccagaaagaatagaggccggattacctgcatgagttccagcttgatatgccggaccaagtggagcgactttttccataatatctactcgaccaccgtaagcgccaatcggaagaccgccaccaataattttacccatcgcagtcaaatctggaataacacctaaataattttgagcaccaccatacataaaacggaacgccgtaataacttcatcataaataactaaagagccattttcatgtgcaagttcattcacggcctctaaaaaaccttccgcgggagcaaccattccaaaattcccaacgattggttctactaaaacagcagcaacttgatctccccaaacagctaatgcttctttgaaagatgtaagatcgttaaatggaactgtaataacttcctccgctgttgatcttgttactccagctgaatctggaataccgagagtagaagggccagaaccagcttccactagcactaaatcaaaatgcccgtgataacaaccggcgaatttaataattttatctcgtccagtataagcacgagccacacgaatagtagtcataaccgcttccgttccagagtttgtaaaccgaactttttcaagagaaggaatggcctcttttaacatttttgcaaaagttatctcgtgtttcgtaggagtaccgtacaaaacgccattttgcgccgcttttgtaatcgcttctgtaatatgaggatgcgcatgcccagtaataattggtccaaatgcagctaagtaatcaatatacttattaccatctacatcataaaaataagctccattagcccgttccattgttacaggaataccaccgccaactcctttatttgacctagatgggctattaaccccgccaactatatgtaaaagtgcttcatcatgcagtttttttgacattgaatgatccatttcgtcatctcctcaaaattttaataccttctatattctatgcgaaaaagtgagatgccgcaatcgaaaaaacaatattattgctgataaatgaaaaaaagcataaaattaaagtatagctaaagagaggaagtgaggcagaatgaaagttttgtttacactagatgtacccgaacgccttaaaaatttacaagcggaaaaatttccggacgataccttctattttgaaagtattgatcattttaccaatttaggcgaagtggatgtcatcatcacatacggatctaacattactgaagaaaaaataaaaaaagctactaatttgaaactaataatggtattttctgccggagtagatagcctaccaacaaaaattatccaagaacaaaaaataaaagttgctaatgtaagagggattcatgcaataccaatgggagaatatgccttatcatttatgttatctcacgtaaaaaaagcagctttcttctataaaatgcaaaaagaagaaaaatgggcaagcgaagaacctataactgaattagcaggaaaaacattagtggtggcaggtactggagcaatcggagcaaaagtagcagaattcgctcaagcttttgatatggaagttatagggattaatactactggccatccagtaaaaccatttagtaaaacatatgccatgactgacttggaaaaagtagctcccttagccgattttttcgtaagtgttttgccacaaacagaagaaacctcaggcatttatcagttatccttttttgagaaaatgaaaactaacgccgtatttattaatattggaagaggaagcgcagtagaattagaaactttagaacgagcttcaaaagaagaacaaatcgctcatttttatctagatgttttaccagaagagccactgcctgcagaaagctatctatggcaagcgagcaatgtaacaattaccccgcatgtatctggtcattctgataaatatttggatcgtagttttgagatttggtttgaaaatataaatcatttgaaagaaaatacaaaattacgtaatgaaattgatttaaataaaggctattaagctacaaattatgccattctattgacagttaagcgttatttccggtattatgaatataataattatttttggaagggagtgcatggcggtgtctaatgcaactctaaaagaggcagtagatgtcttaaagaaaacaggagtaagaatcactcctcagcgtcatgctatacttgaattcttaattaactcacatacacacccaaccgcagatgatatttatcggtctttagaaggaaacttcccaaacatgagtgtagcaacggtatataataatttgcgcgtttttcgagatgccggtctaattaaagaattatcctatggcgatgcatctagtcgattcgatttctcaacttctaaccactaccacgcaatttgtaacgtatgtggaaaaatagtagactttcattatccaggcttagatgaagtagaacatttcgcagcccacgtaactggctatgaaattgataatcacaggctggaagtatatggaacatgtccagaatgtaaagaaaaacaatcaaataattaaacaaaaacacttagcctagctaggtgttttttatgtttttagtactttttttcatttttatttaattttatgcataattcggttgacatatatctcaaaacttgatatattagttttcggcgctacaatagcagtgatttaaaagaattttattcataaaataaatttaaaaagttgttgacagatagttgcttaaatgatatgatttaaaagtcgcaaaaaacaaacgaaaacattcgcacatcaaggatgaaagcgactaactgacctttgaaaactgaacaaagaagaagacgaaaagcaatgagacgtaaagtctcactggtaatcgcagggcagaaaacagaaagctgttttcaacaaaaacaaactagtaatttaattgctagcgaagtcaatttgacgcaaggaatcttattcacggtgttgaataagtattcaaattcaatttatattttaaagagagtttgatcctggctcaggacgaacgctggcggcgtgcctaatacatgcaagtcgaacgaacggaggaagagcttgctcttccaaagttagtggcggacgggtgagtaacacgtgggcaacctgcctgtaagttggggataactccgggaaaccggggctaataccgaatgatagagtgtggcgcatgccacgctcttgaaagatggtttcggctatcgcttacagatgggcccgcggtgcattagctagttggtagggtaatggcctaccaaggcaacgatgcatagccgacctgagagggtgatcggccacactgggactgagacacggcccagactcctacgggaggcagcagtagggaatcttccgcaatggacgaaagtctgacggagcaacgccgcgtgtatgaagaagggtttcggatcgtaaagtactggtggtagagaagaacangggatagagtaactgcttggtccttgacggtatctaccagaaagccacggttactacgtgccacagccgcggtaatcttaggggccagcttgtcccgataattgggcgtaaccgcgccaccggtttttaatttaatggaaacccccgctacccgggagggcatgc

SEQ ID NO: 8 - DNA, 495269 bp, Listeria innocua
  misc_feature (1)..(end): n can be any nucleotide: a, g, c or t/u
aatcgtaaattttgtatcctacgcaagaaaaatgatacatcggaaaggagagcaagtgacagtaattaaatcttcaattaacgcatcaaaagttatgcgttatgtggatgatattcctcaaaaacaattagcggatttacttttgacaagtagacctaatgtaagccatatgcaaacaggtagaagaaggatgcagcaagatattgcaacttcagcattaaataatgtacaaagtaatttattcaaattagcactatcgcatgaatttactgaattaattccagatgtttttgatggtcctgcaattaataataattcgttatcatatctcgttatgtatgaacaagaagctaacgagtttagtgcgaatatcgatgaggtaatgaaaatttttgtaaagccagcgagccaattaactcaaagcgaacggctaactgcaagagacagtttaaaagaattacttgatgcactcggttggggttataaccttttatttcatgcaagtgatcatttaaatatcgatgtgtatcaattaatgagtgaacaagatgagagttggaaacaaaaaaagtggatttgaaagaggtgaagataatgccaagtattcttaatgaggaggaaattttcaatcacgtaaaagaaacatcaataatctgcttctcaagattagtagaggaattaaaagattcgctcatacaaaattttgaagacgaagaacttcttagtgctagagaattatgccagcgaatattgaaatgtagtaaaaatacagcagataaatattatctaaacaatgcttcattccctttcatccagcaaggtaatgagcgtcgttatccaaaaaaagcagtagaaaagtggattgaagaaaattcaagaaaaaggtgattttatgttattagcggtaaatattgttattggatttggtattttgttaaatctatcaatctatgcatatcagaaagggagtgagaaagccgatgtcaataccgatttggatagcgattgtgtggatactcgtgttgctcggaacaatgacgttaatatcaagcgttaagaagttatgcaagacgataaaaaaagttggcttggctaactggtatgaaagttggatttataaatgagcgtaggattacttttcatcggttttgcagtgtttgtagcattaatagtagcttttaaaagcgaagaaggaggattcaagcgatggaagaaataagagcaattcagaaagttgtgaccgttaataacgaaaaaaaatatattgtaagaattacaccaatcaatgactccacaggaagaaagacgtttaaaggcgtaaaagtaaatatgttacttgaaaatggagagcactttgctcaagatacttttgcatcaaccatcagccctggaataattgaaagctggattgtaaatatgcacaacgcaagcgaaaaaattcaaaaaaccatggatgcttttgaaagttgggatggtgaattgaatgaatactggtgatacacaaaacatcacgattgtagaaggagtaatgattgtaacgacaaaaaaataaactcgtgcgctaacacgagtctgaaatagatagctattcgctaaatataagaattgaattacttatagtatatgcgattagccccgttttgacaaattaatttttagaaaggggtctttattatgcaaattaagactaatgagctcattgaaattttaaagaattcaagaactcactcattagaacgaatcaaagctttagagattaacttattcaagtacaaacgtgtaaataccaagccacctaagcaactaactgaaaggattgctaatcacgagaagaagattgaaacaataaaaaaattagaagacgaattgaagcaatcagaaaatgaagtttgtaaattttaaaaattggaggattcaagatgacacaaaaaagtattgaagaagtgaaatttgaagaggcaaaaaaattaataactgggttacaagcaattgctacatttaatgaaagcataacttgtgccgtgaatgtaagcttcaatgatggaaaaggtatacacagtgcgtcatctgcaattggagggaaaagcgaactcttaaagatgtatggggacatcgccgaagcaattgtatatgaatttatgaaagaccatgattgtgtgtgcaacgtgaatgaaaccattgaacatgcaatagaaggggcattaaatggatttcaaaatttcaaacaagatgcaaaggagaaaacagatgaaaacaattaaattgctaaagcttcaactagaaaattttaaaggtatcaaggaactagaaattgattttcaagataatacatcaatatacggagcgaatgcttcggggaaaacaacaatcttagatgcgttcacttggcttttattcgataaagacagcacaaataaaaaagactttgctattaaaacattagatatggaaggtaaagttattcacaagttgaatcatgttgtaaccgcagtgattgatgttgatggcgaacaagttgagttgtctaaaaagtacatggagaagtggacaaaatcaagaggaaaactagaacaagagttaacaagtcatactacagaatattatatcgacgagatcaaaaagaaagcgaatggatataagtcatttattagcgagctactagacgaggaacttttcaaactaattactaaccctctttattttaatgagcaatttgactggaaaaaaagacgtgcaatgctaattaaaattgcaggtgatgtaacagacgcagaagtaacgagtgcagatgattcactgaaagatttaagcatctttcttggaaagcactcgattgaagataaattaattcagattaatgaacagcgcaagaacttgcgtaaaagattagaacttatccccgaacttgtaaatgaagctactaaagctaaacaagatgtaaccggcttaaatccaagcgatattaaaggtgaattatcagtaattgaagaacagattcaatttatcgaacaagaaaaaaatgttctgaaaaacggtggtatacaaactgagcttaataagcaaaaagcgaacattgaactggaacttacaaaaatcaaagcaaatgagcaaaaagaaacacaagaactattaatgagtaaaaaagaagaaattttcgaagaaagaaatgaacttatagatgtaaataaccggattggtgaatctacttttcttattcagcgtaaacaaggagaaattgcaactaagcagcaagaattaactaaattaggcaaagagtgggacgtattgcaggtagaaaaatttgacgaacatcgcaaaaaatgcccgacctgcaatcaagatttcccagcagaacatttgagttctatgattgaaaaattcaatcaagaaaaggcagaaaaaattaaagaaaatgaagctgcaggaaagtcaagtaaagcagtaattgaagaaacagaaggtgatattgctgaactttcgtttgatattaaagcgaatgaacttgaattgaataatattgaatcaaaattagagattttggaacaggaaaaaacagctttagaacatcagctggaacaagctgaaaactctactacttacatcgagaaacaatctgaactggaaatgattgaagaaaaactgcgtgatgaaaaaggttcttctataactgcagtagcagagattcaaatcaaaattgataaattgaatgctgaagcaagtgatttaaaagctgatttagcaaaatttgatagcaatcagaaacaagaaaatcgcattcaggaattagaagaagaagcagcagaaaaaggcgctaagtacgacgaattggaaatgggattatatctcattgaacgatttaataaagcaaaatgtaatcttcttgaagacaagattaacagcaagttcaaatatgtttcattcaagttatttaaaacgcaaattaacggtgggattgatgagtgctgtgaaacgatttacaacggtgttccttacaattccggattgaacaatgccgctagaatcaacggtggtttggacattattaacgcactaacagagcatgttcaagttagggcaacgatatttgtagataacagggagtcggtaacggaactaattgatacagaatcacaattagtaagcttaatcgtttctgagtcagataaaaatttgagagtggaggcatagaaaatggcaaaagagaattatagcgacccaaacggaaaattgctcaatagtataacgacatttgaagtgaatggagaagaagtaaagttatctggcaatattattagggattatctagtaagtggaaatgcagaggtaacagaccaggaaataatcatgtttttgcagttatgtaaatatcaaaaattaaatccatttcttaacgaagcctacctagttaaatttaaaaacacaaaaggaccagataaacccgcacaaataattgtttctaaagaagcatttatgaagcgtgctgaaacacatgaacaatatgacggatttgaagcaggaattatcgtcgagcgtaatggtgaagttgttgaaatagaaggagcagtttctctagataaagacaaattactagggggctgggcaaaggtttttagaaaagacagatctagaccagttagtgtaagaatcagtgaaagagagtttaataaaagacaatcaacgtggaatgctatgcctcttacgatgatgcgtaaaaccgcagttgttaatgcaatgagagaagcatttccggataacttaggcgccatgtatacagaggaagaacaagggtcgctacaaaacaatgagacaagtgttcaagaagagattaaacaaaatgctaatacagaaatgctagatataccagcacagcaaattgaagtgccagattttaaagaaataagagagccagagcatgtggaaatgccaccgatatatgatgagcagccatctacaccgccagctagaccttattaatatggaaattaagacaattgcgagtggaagcaaagggaacgcctacgttattagtagcgggcgctcccaactactaattgaatgtggagtaaacttcgacaaaataagaaaagcactaaattttgatttatcggcagtggaagcctgtttaatcagccacgagcatggagatcacgtcgctggcgtcaaaaagatgttacgcacatccagcattaagatatacgcatcagaaggcaccttgtctgctttaaatgttccggacagtcgacaattcattttaaaagaaaaagacgctcaaaacatcggagaatggattattttaccgtttcaaactgaacatgatgcaaaagagccgcttggttttatgattcaacgccataatgaaagactacttttcattacagacagttattttgtaagatacaaattcaaaaacatcaactatttaatgattgagtgtaactattcagcagatattttagaagaaaatgtaataaataaagttatacatcaagttcaaaaaaagcgtgttttacaatcgcatttcagcttagaaaatgtaaaagagtttttgaacgcaaatgacttatcgcaactaagagaaattcacttgctacacatttcagagagaaatggtgatcctgaacgatttaaaaaagaaattcaagctatgaccggcgttccggtttatgtataggtggtgatgatatggcaaggcctttaaaagaggggttagattattttccgttagatgtagatgctgattatgatgataaatttcaattaatcgaaacgctacatggaccgactggttttgcaataatgatcaagttatttatgaagatttatagtcaaaacttttactataagtggacagaaacagaacaaatactgttcgcgaaaagagttaatgttgacattaacacactgaaaacagtagttaatgactgcattaagtacgatttgttcgacaataacctttttagtgagtttcaaatattgacaagcctaggggttcaagagagatatttcactgcaattggtcgaagaaaaaaacaaatagtagtactagagtacttgttactagataggccagaagtaataaatttatgtcctaaaatcgtttttgcaaacattaatgttgtaaatgatgacattaacgcggaacaagaagagttaatgccagcattaagtgcacaaactaaaggaaaggaaagtaaagtaaatgaaagtaaagcagtagtaagcgaacaagaaaaactccctgaaaaaattgtaaaagaaaaaccaactactactgcttataaattttgggaagaaaatgttgcaattaccggattatcggaattcgatagagaattgctaaaaaaacttatttctctagggggcaatgagttaacggtacatgctatgaagaaggcaattgaactgaacagacgcagaatgaaaactgttgatactgttttgcggggttggttagataatggagttaaaaccaccgctgaagcagatgaacaagaaaaaaactggaatggtggtgctaaaaagaatgcgcgagcagaaccagcaaaacaagaaattaaaatcagcgaccaatataatttcggagctacaagaacggattgatagacatacgcttaccgaagcagatgagcaaaaaatccgaaaacagattgcaaaagaagatgccgagctggcagctaaagcacttgactctgatagaaatcaccagttaaacaaaatattttctaatagcatgattaataaaaagcttgaaaatgcgagttttgaaaactatcacgcagagaacgaagagaatgcaaaagctctagcagtttgtagacggtttgtagaaacgtttaatcttaatcagcctagaagcttgctactaacaggtgcatatggtgttggcaaaagtcatttagcggcttccattatgcgagatattagtgaaatagatattgtactaaaaagagacaatgaacgtgatgtcgtgttaaagacgagaaaaccaacgatgatttttattaacacgcctaagttattaacaaaaattagatcatcttttagtaagacgagtgagtttactgaagcagatttgttaaatgaaatcgaaagcgtagacctcctggtcttagatgattttggaagtgaaatcaaagaagcaaataacgattttgcagtacaaaagattttcgaaattgtagaaggccgtgttgggaaacacactgtttatactacgaactttaacgtagatgaactttttaatttctatggagaacgtaattttagcagaattatggaagatggaaatttaattcaaatgtcaggagaaaattatagattgcgaggatttaaaaaatgatacttactaaggaaatgccgaaatatgtcggatttgatggaccatcgccagtaaatataatcatctggaagctattagacaagaaaatagcgaaaacggtatgttacacggccgaagaagtcgaagagcagctaaagctacacgcatggaaatttgatggatatgaggtcttatctaatgcagatgaaaacttttaaaatttggctaaaaatttactgggtttctggcctttgtcaaaatagaagctttgaagtagaagctagaactttcaaagaagcatttgataatgcagaaaaaaaggtacctcaagaaaaagtgaagaaaataaaacatttacagggagatatcgtaggttacatttttgaaccgccaaagagaggagctaataattttgaaacgaattgagtacgttgaaatcattaaaaaaattcccgggacaccttttagattaggagggatatacgaaatagaacgagtgggttcagcaaatgcacgtgtgagaattaacaacagtatttaccaagttcctaaagaagcgctaaaagtagttgaacaagtggaacgtgaacggtgggaagaaaatgataaaattcacgattaatattcctccacatccacaagaacgaccgcgttttagaaatgcaggcaatttcgtacaaacgtacgacccgcctaagtcaaaagagtacaaaaagaaaatagcaaatgtggcaaaaatgtatgcgccaggaacgccaataagcacaccaattcaaataaaattgatattctttgtgtctattcctaagtcgaaatctaaggcttggaaacagcgagcattgctaggacaagaatttccctcagtacgcccggacattgacaactacgttaaagccattttagatgcgcttaacggaattatgtttagtgacgatggcaagattgttgaattaatcgcttataagagatattcggacttacctagaacagaagttagcataacagaattagtttcagaagttcaaacaaaattattttaaaaaaattggaggaaaaaagaaatgattaattgttacgcagaggttagaaatgtacaggtaaaaccaaacgatacggtggaaattaaactagtagtagatgtagatgaattatctggccaaaacgaagaacttatgaagctagtaggtagagaagtaaatacttcactcgaaagcaaccaaatatcttaccgtgaaaaggttgacccagaaacacgagagccagttcttaaatatatggtccataaggatggaactgtggcgatgtactcacaagaaaaacttgatttagaactagaagaattacccgcagaagaacgttcaagcgtaattaataaatccgaaattgatgaatatattcttgcttgtgaaggaatcgcgatgacaatacctggtgggatttttgaagggaaagaagtacttcaaaaattatcagagggtgaagacatagaggatttggctaggttttatggaactccggttaaagaaatgcaagacactttagatgaatatcgtaaattcgtagctgccaaagcaaaagcatggcaagactggaaaaataactctgaacaaacagctgatagtgaagaacaagaatctgaaaatgatggtcaagcaactttagagtttgaaaccgaagaataaaatgctgggcgggaaaccgcccttgtaaagaggtgaggaaatgccatcagaagaattaaatttattcgatttaatggattactatcctgagcagtctgctaaaaaaaagcgaaaggaagaagccttaaaaccgattaaaacacataaaaacgatagattagattatcctacagcaagagccgaaatagagcggattttaggtaagaaagtaactacagtttgcggatattacgatcacccaattaataaagaaattcgatggatattcaatttagaaaaaggatgctgctacattaacgataaatgccatttgtattcaacagaagaaggaaaaggatacaaatatcgcggaaaagtacacgaggaggttttttataatgcagacgatagaaaaagagctactacaacgattgagtgagagaagaataggggttcaacatcagattgcttcacttgtgcatacagagaagtgcacgttgctagaagcattaaaaatgacagatacagaagtcgatttgacttttaacgagatgcggatggagttagatagttaggaggaaggataatgacaactattggaatgttaagcataaaagagcaagcactcaataaaatgttaacggaaatgaatgagaaacactcaggagctgaagatgcagtacataattggctctgtactcaagaagaagaagcgatttttgaaggtattctgaaagatgatagaagcattagtggggcggttaaatactgctcctcaagggcttcaaagcatcaggctgaaggcgtggccatgattgatgacaaaacggtcttttcctgggtgaaaaagtattttatatcagaaaaagtgccgaaaagtagtgtaaaggctacagttaaaacaactgcaacaaaaccagaaaaagcgaaggttaaagctaaggaaaaaccgaaaaaaacaactgcgcaagaagggtatgagcaattagatttgcttgatttcttatgaagagagaagcacgaaattatattgataataaattaaagccaccaaaagccttttttgactggtgtttctcacaaattccaacttacaaatggtccaacaaaaaagaaactattctagcttccaatcgaaaaaactgcagtgttattgaacagaagttaagaaaaaattctagattgacattttttggtaaattgaacgtgttcggtattgtcttagttacatcgaaaagaattgagatacaaagttacgcgttctggaatcgagtagtggaaggaaaagaaatgattgaatttgatctagtcaattttgaacaatttgctgatggagaacacgtaaaggttgccatcagcgacggcaagatgtggtttggtttaattccaatatatggtgggatgtctggaggtccttactcaatgattcgattgtttgaaaatgactggaaagaaaaaattcgaagtaaatcagagcttaagtacctagaaataccgcacttagactttaaagaaattgaaactatatataaatatagagttgaaattgaatttttgcagaaaattaaagcaagacaattgtccaaggaagttatgtatcccgtaacacaatatacaaatggatcgtttagaaaaacggtagatatgcggacaattaatgcgaagtggttgaaagaaaacaagcctttctttaagaactcggacagaggttttatggaatttgaattagcaagaagaatacagaaacggcgaggaaaggtagtttctggaattgaaaaatatcttgattaccgtgctatcaacaaaatcccagaaggagtaggaatagttcgctttcagaattggatcattaagaataaagtggattttagctactatctggattatctaaacctaatgcgagacttaaatattgcaatcgatagcgaaaacataattatgcctaaaaatttagtaatagctcatgataacgcggtcaaattactgtaccaaatgaaacatgaagttgaagaacaacaatataaaatgagatttgagaagataaaagacttagaaaaaacgatagataattacgcttttattgtccctaaacaagcttctgatttattaacagaaggcaaagcattaagtcattgtgtgggtggtagtaattatattaaacaacacattgaagggaaaacaacgattatttttgttcgtgataagcagtacttagaaaagtcattgtatacacttgaatacaaaaatggccaaatttaccaactgagaggtaagcacaattgtgagccaacccacgatgtgcaagaggctgcaaacaactgggctgcatcagtaaaaagtaaaacaaaggtattacaacatagttgaggaggagtaaatatgaaaccggaattaaatgagttaaaaaaagctaattacagaattaggcaagaagctgcggatgaaccgcgaattatccaagtatggtgtccttattgctgggaagaaaacagatttaattttgaggaactcaaaaaaaactatggtccggaaccacgttggcttaaacataaaaaaataacgtgtcataagtgtgcaactgagatggaatttggtgattgctgatggctaagaagaaaaaagaaatactattttgtgattattatgaggactgggttgagacttacaaggtaggagctattgaagacgttacgctaaacaaatattatgtggcagcaagacaactacgcgatatttgcccaaaattattgatgtctgattttagcaggaaagattatcaattaatcatgaatgaatatggaaaaacacatgaaaagcaaaccgctaaagatttccaccatcacataaaagcagctattttagatgcttaccacgatgggttactgaaaagcgatccaacttatagggcggttatcaaaggaaaagaaccaggtaaaaagaaagttaaatttctccagaaagaagaattgagaaccttattgcaatctttggatttacaaagtggcattaataatgattggtttctcctgctgattgcaaaaacaggtatgcgttatgcggaggcattggcgctaactccatcggattttgactgggtaaatgccactgtaacaattgataaatcttgggattataaaactcacagagggtttaaaaaaactaaatcgacggcttccgatagagaaatagctattgattggcaaatcgttgggcagttcaaaccattaattcaagatttgccagctaatgacccgatttttatagagaagacagaacgaggaacatataaaaaacagtataactcaacaatgaacaattatttagaagcgaaatgtaagacattaactataacagtgataagtttacacgcccttcgacacacacatgcaagcgtactgcttgctgaaggtgtttcgattcatacgatttcagcgcgattagggcatgccgatgtaggtgtcacgcaagaaatatacgcacatgttttagacgagttgcaaaagaaagatgatcaaaaaatgatgtctgttttaatgcaaattgcgtagcgaggtgattagatgcgaaaaaattggacggatgaggaaatcagagttttacagaataattacgaatacgtagacactgagataatagctaattttttaaatcgctcatatcattcaataaaaaacaaagcgacgcgacttggaataagtaaaaactcggagtggacagaggatgaggatatttatttaaagtattttgtttatgaaaacgacgacgatattagcaaagctgcagaatttttaggacgtacaaaagatgcagttataaacagactagtgaagttaagaaaaagagattcttcagtttcttttattaggcgtccgtggacagaaaaagaagatgagatactaaaaaaaaattatattattatgtcaaatgcccaattcgctgaacgattaagaagaacgaaagcctctgtagcaggaagaaaggtactgttaggactgacaaacaaacacatgtctaaagaagatgacaaaataattcgtcatcttggaaatcaagggtacacaatcaaagagatctcagcagaaatgaatttgtcttattgcttagttaaaaactatataagaaatcaccgaatcaattatagaagggaatcaaaaaacgggatgaacggttggcgaaaagaggcagatgcgacatattcgctttatattaacgctaaaaaaatcaaggagggccaagcatgattaaatacttcgaatacacaagaagagaaaactatctttatgcattaattaaagcagaaagcaaaaaacaagctgattttatttattggcgtgatgttgttaagtgcgaagaagaatttgcaagaactggactaataacagaattcaatgccgttgaattaacagagaaaaaagcgttaaaactcttcatgtcatctttgcaagaatatgaaacagaggaagaaataaaacaaggtttttatgaaactgtcaacaataaaattttactgcttgattccgatttaatttgagataggaggacgattatatgagtgaaacaactgaaatgattttagagggtattttgtgtaggaattgcggagtattcattgatgatgtaaatccgggatatccgagaacatgtgaagattgtgaagattgtgaggaagataataatgaaaaacggtaaaaagttaactagaaaccaagcaacgatgctaaaaaataatggtcttaatccggataattggctcgtggtgaaaaatcttaatgatcgaatggaaatagtgaaccgagaaaccggaaataaaaaggtgatttataaatgacagtacacaaattaaagattctacctgagtttttcgagaaaaaaagaacacttgtaaaagcgtttgaaataagaaagaatgaccgtaattttatggtcggggatactcttatcctgcaagaatatgtaaatggtgaatacactggccgagagtattgggaagatgttgtttatattaccgactacttgcaaaaagaaggaattgtagtcatgggtacactaccaaatgagcgagaatatccgttttaaagggtgatgacatgtataaaacagaaaaacgaacattacggcaaaacaaaatgattcatgctttgattagtgacatcgtaaagcacacttataacgattttgaagcgacaaaaccgagaagcttcagcaatgattgtcaagttgtcaaagaaactttaaaagtggcgtatgcagttgaagcgaatttaccgggtgatttcagtacagcgaagttatcaaaaatacaagctcgcgacttcataagttccattatagagttttgctttcaatttgatataccgttatccgcttcaggactgcaaatgacggatgatatcaatagatatttgttcttatgtatcaaatacagaaaatgtgctataacggggcgcagaggcgaaatacaccatgttgattccttaggcgctggaagagatagaagaaattatgatcacagtaaatcaagattaatctgtttatctcgagaaatgcacacagaagcacatcagattggatggttaacgtttaaaaacaaataccacgttgatggaataattttaagtccggatgctgtaaaagaattaaatatataaaaaaagccagagcgaccgctccggcgtggaatgtgattcctagacaaaatcattataccacaatggaggggttgcgtgtgatggcgctgttcgaactaccgcaaattaacaatgttagaacaaaaagaaacgtaataagagctttagaaaaatataaaattatgagagttagactcggcgagagaagaatgccaaagttaacttctacattgaccatagtgccaccatcatttaataatgaattccattctacgacagaagaaagtgcaatatggaatgtagatgcagtaaatgaagcaaaagcatatgttaaattgattgatcatcacatcaaccaacttcctgaacggagtaggcaagtgatactaactaaattcattgaagaaaatagtgattatgaagctatgttggccatacatgtaagtcactcgcagtacaaagaagaaaagagaaaagcaattgaacgcctagcctatcagcttaatatagtagttgaaaaatgaggagggaacacaatgaataatttagcagtattagataaaaataatacattaaacagtcgtgaagttgctgaaatggtagaaaaaaggcactctgatttactacgtgatatcgaaacttatattagatatatcaatcaaaacgcaaaactgcgttctgatgattttttcagtgaatctacttatcaagctggcaccgggaaagattataagtgctatgaaatcacaaaaatgggctgtgaaatgatagccaataaattaactggggcaaaaggcattcagtttacagctttatttgtacaaaagttcaacaagttagaagaaaaagaaatgcaaactttttatattccaggaacctacgcagaagcacttacacttgcagcaaaacaagctgaactaaatgagcagttaatgttagaaaatgaagtgaaaacacaaactatagccgaatatgaaccaaaagtgagttattatgatcagattttaaaatctcctggattaataactgttacgcaaattgcagctgactatgacttgaccgcacataagctcaataaaatattatacgaagagcaggtgcagcataaagttggtgggcagtggatattatacaaaaaacatatgaatttaggtttgactaaatcagaaacggtcagcatagttcatagtaatggacgtctaggaacaaaagtaaacaccaagtggacacaaaaagggagattatttatacatgaaattcttgaaaatgtcggaattcaggctgttatcgacaaggatatttaacaaaccggctttttaccggataaaattaaactttttgctgactttttaccggctttttaccggacaaaaaacaaggaattccgtggtaagatgttattgtcaagaaaataagaaataggagctggtaattatgaaacatgaaatgactaaatatagcatggacggaaaacgatatgtatcatcgtggctacaggtaaatatttttggcaaggcattatgctttaatcataaatcaatcgcaatttaaaaatatacagtttgcccagaaagaggcattgtatcttatcgttggtctgatatgagacgcatcatatccaacactcgtggcggaacaggtagacgcattggaggtaagaactaatatggctaaggagcgtaagccttagcttaagaaacctatagcaaaaattacttagttcatgcaaggtgcaaatccttgccgagtgctttgaacattaatacctccatacccaaggacagatacgttctgatatggaggtttttctatgtagaaaaggagataacacatgaaaaattttgtgtatgttgttgcaaatgtgaaagatggtaacagcttaatcgacttctttgtaaaaacaaaaagcaattatattaccgaattaaattaccgtgaaagctacattatcttattaaacgaacgttggtattttcgagttatgaatgagagtgattttgctgatgtgggtaatgttgatggttatcgattttcacaaaaagcaaaaatatctctttctaaaacagggaattatcacacgatacgcaagaaattaagtgatttatacaaggagtcgagcaaatgaatatccaagaaatagaagtaagcaaaattaatccggctgcatataatccgcgtatagatttacagcccgacgatccagaatatcaaaaattaaaaaaatcaattgaagaatttggctatattgacccactgatttggaatgaaagaactggtaatttagtcggtggccatcagcgttataaaattttactcgagggaaaaccggaaaacttaactgtatcagtagttaacctagatatagatcaagagaaagcattgaatattgcgttaaacaagatagaaggtggatggaatactgataaattaggcgaattactaaaaagcattaatgatgaagaaatgctaaatttaacaggattctcagcacttgaaatagatgaattaattaaagagttcgaattacctccagctactgtggataaagtaaaagaaaacccgttagactcgaatctgttcgagtcttttttgtttccgccgttttcttatttggattcgaaaacaagaagatggagggataggaaggaccaatggaaaaatttagggattagaagcgagctagggagagaaggtaatctcacgtttgcatctagcttacggtcagcaagtttgacaggaacgagtattttcgaccccgtactttgcgagttggcttacagatggtttactcctggagaatctgccaaaatatacgatccattcgctggcggctctgttcggggtattgtggcaaaagtgcttggccacgaatatactggaattgatttaagaaaagaacaagtagaagctaaccgcattaatgctaaagaaatcggattagatggcattaattggattaccgataatagcttaaacgcggataaacatattgaagataactcgatggacttattatttacatgcccaccttactttgatttagaagtatattcagataataaagaagacattagcaacatggaatacgatgaatttattaaagtgtattccgagatattagataagggtgcgaataaattaaaagataatcggtttgctattgtggttatttcagatgtacgagataaagctggtttttatagagatttgaccggtcttactaagtcaatttttgagaagaatggtatttacttctataatgacttgattttgttaaactcactaggttcaggagcattaagagctcgcagaaatatgcgtaacaggaagttagttcggatacatcagaatgttttagtgttttacaaaggaaatcctgatgagatacaagaacatttccccattttagaggtactggaagataatttagaagaagcgcttgaatctatcgacatttaaacgaatatcccttacagtatcagcataaaggaaacggagtggtgtacatgagagaagatattcaacgattaaaagataaagcggacacagctaaaatgaaatatcatcgaaatttaattgatagagaaacagctaagaaacaaataattccatacgcggaagcttttaatactagatcgaaagagattgctaaaaagtataatcaaaagcctaaattactttcagtagcagcgtttttaagataaaaaagaagaggtgcgttaacaccccttccacatgccgccatcactggcgtgagatagtgaaatgaccacgcgtggttttgagaactcactatctctttttctattctaatagaaagctggtgaaaaggcaatgacgaaacagaataggcgttcgattgatgaaaacgcaaatgatgaattattagatttagagattagcaaggctcttgaagaagttaagacagatgaagaatacaagaaaattattcgcgctacgctgggtaagtggcttaataatctacaagaaggcaatatacgtcttgaatctgtaaatgaccttaaaacactaatcgaagcagatagattactaagaagagattaatttttattgaaagattggagaataaacatgacccttatattttggactaaaaatggacaagagatggaatttgatctagttgaaaatgtagagattgacgagaaaattattacattcgattactatggagaaggtgaaaaaagaggcgtagtgtttatattaaataatcttgctggcatggctgtagaggatgagaattcggagagtgaaagtaaagatggcgcatcttggtttaaagtgtacaggggttaagtaaagtaaaaacaaactcaacacaagacaggtggtgacagtgatatggcaaggaaacgcgacccacgaagaattgaagcgaaaaatatgtggcttgaatccggcggaaaaatgaaactggttgatattgcaaataaactaggctgctcttctaatcagatacggaagtggaaatcaacagaaaaatggtccatcgatgacgaaatagagagcgttcctaaatcgaatagtaacgttactaatgaaaaggaacgttaccataagttaaaagggaacagcaacgcaatcggtaatcgcggaggtgcaccaccagggaatggtaatgcggttggtaacgttggcggtagcgcaccaattggcaataagaacgctgttaccacaggggagtttgaaacgttgtcctgggagtttttaacagaaagagagcagcagttgtatgagagcatggacggcaatttagtaactcacattaaccaaactatccgtgagttagaaattagaaaacggcgtatgatggaacgcatcgcaaacattgaaaaatcaatgtctgatattgaaagaagcacgcttaaacagctaagagaaaaggagtacattggtgagaagaatggaaaaaaggttgttcttcacagacaagagctagtaaccgttgaggagcgcgaaaaggtaactgctaaaatcgaccgaatactaagtcttgaaaactcgttgaataacgtcactaaccaactaatcagagcaattaaacaacaaagcgacctagaacaagccgaattaaaaaaaggtcttatacgctctcaaacgagcctaaatcgcgagaagctatataaaccagatgaagcaaataaaagtaccgcagtaaataagcctgacttctcgggaatgagtacagaggagttgaggagttatgcagcaagccttagaaaatgacgtaacagaacaagaggccttgttggaagaacttgatatagaacttgctaaacgttcttatcgcgattacgtgacttattcgcactttggagattaccagttatttgaacacactgaattaatatgtgagaagttacaacatattatcgacggtgaacagaaatattacatcttcgaaatgccaccacggcatagtaaatcaatgacaattaccgaaacattcccatcgtacttcttgatgaagaatcctaagaaaagagtcatcacaacatcttattctgacgctttggccaaacaatttgggcgaaaaaacagagataaaataaaaatggcgggtgatcagctttttgatatacacatcaatcccgctaactcaggtgtcacggactggagcattgaccaatatggtggcggcatgtactcaacttccatgctcggtggtgcaacggggcgtggtgctgatttattaattatcgatgacccgattaaaaaccgagaagaagcggaatctaagacaattcgggataagatataccaggagtgggagagcacattctttactcgtttgcataaaggtcatagtgttatcgttattatgactcggtggcatgaagatgacttaataggtagattgttaaaggcaaatacactaccatgggaaagaataagattaccagctattgccgaggaaaatgatttactaggacgtgagattggccaagcgctatgtccggagcttggctataacgaagaatgggctgaaataacgaagaagacagtaggtagtcgaacgtgggcttcactataccaacaaagaccgcgtccggctgaaggggcaatttttaaagaaaaatggttgaggtactatgtccctagtgaagaattcagaaaaaaatataatttaggtgaagacgtggcaatactgccgcgtctttttgataaatcggcacaatcgtgggatatggcatttaaagacacaaaaaaaagtgactttgtcgccggtcatgtatggaatcgtaaaaaagctgatttcttttttattgatcgcatacatgacaggatggggcttccggagactttaaatgctgtaaggcgccttactataaaacatccgttagctattgctaagtacattgaagaaaaagctaatggtccagctgttatgcagacattaaaaggagagataaccggaatgattggcgttgaaccagaaggtgggaaagaaacacgggcgtatgccgttacaccgctttttgagtcaggaaacgtgtattttccacatcctttatacgctccgtggattagtgatgtaatagaagaaatgctggcatttcccaacggggagcatgatgatgacgttgatgctatgacccaggcacttgttaaattaatgataggtcaacaatcgttgttagatagatataaaaacttaatgtaaaggtggtgagcggatgtattcaattgataaagcaaaacaagcaaagatagattcaaagatagttaataggaatgatttcatggttggccatggaaaagcaaactctcgtgacaagttaacaaggcaaacaccaggtaacggccaaaaattagatttgaaagcatgtgagaatttatatgcttctaacagtattgctatgaatattgtagatattatctcggaagatatggttcgagcaggttggtctttaaagactgataacaaagaaatgaaaaagaacatcgagtcaaaatggcgtaagttaaaaacaaaggatcgatttcagaagctttatgcagataaacgactttacggcgatggctttctaagtattggcgtagtatcaagtaatagggaacaggcggatttgagcactgctatcgatccaaaaacaattaaaagtattccatatattaatacttttaatacacagaaagtaactcaactctatttgaatcaagatatgtttagtgagcactttggtgaagttgagttttttgaagttaatcgcgtgtcccaactaggagaagaaatattatccggaacgacagcatctacttcagaacaaattcaccgttcgaggataatacacgagcaaggattgcgttttgagggcgaaacaaaaggaaggtccatatttgaatcgctttatgatattattaccgtgatggatacatcgctttggtctgtaggtcaaattttgtatgactttgcttttaaagtgtataaaaccgatgacatagacgctttgaataaggatgataaggcgaatttaacggcaatgctagatttcatgtttcgtactgaggcactcgcaattatcaaaggagatgaacagctgactaaagaatcgacaaatgtgtcaggaatgaaggatttgctcgattatggatgggattatttggcaggagctgttcgaatgcctaaaacagttctaaaaggtcaagaagcaggtactcttacaggtgcgcaatatgatgttatgaactactatgcgcgagtttcgtctatccaggaaaacagacttcgacctcaattggaatatttaacaagattgctgatgtgggcaagtgatgattgtggtccgagtattgatccagattcttttgaatgggctattgaatttaatccgctctggaacttagacagtaagacagatgccgaagttagaaaactaactgcagaagcagatcagatttatattgtaaatggtgtattagaccctgacgaagtgaaagaaacacgttttggacgtttcggattagagaattcttctaaattcagtggtgatagcgcagaaattgataaattagctaagcttgtctatgacgcgtatgcgaagaagaacgcagatggctaaaagacgcgttcctgcgactcgctatccacataatttagaaaagagttatactaaacagctagtaaaacttagcacggctttgtctgacatgtttttacatgaatttgacacaaatattagtgccattctaaaaacgtctcaaaatcgctctgatgcgttcagagaagatggtataagtgatgccgttcaagctgttttaaataaagtaaaggcgctaagttttggattattcaacccgcgagacaagtattctattgcaagtaaacatgttaaagcaataaatacgactaataaatcacaaataggcaatcaagtgcgctcacaaggaattgagcccacacagtctgaaccatggttaagtgagttcatggacgcttcgattgccgaaaatgtaagttatattggttcaattgcagacgaatttaacgccaaaacagaacaaataattttgcgtggtgtaaaaagtggccaatcattaaaagatatgcgtgatgaactggttacgcaagtaggtacatcaaaaaataaagctgaatttatcgctaatgaccagaccggaacaatctttgggcagatgacagccgagaggcataagaaagcaggcatacccggctttacttggagagattcaggagatgcagcggttagaccatcacaccacgcaagaaatggtaaagtttattcatatgatgatccaactgcaccgattcctggaactgattatagatgtcgttgcactgctggtcctgaatttgatgaatctgtagttaaagctgcaacaaatgagcgtaaacaacaagagctagaagataaagcaacattaaaaaacgcttatagcgaagtagctcaagctgctcaaaaagctccggataatgttaaggacttaataagtagtaacattactgcaaattcttttgagatagtacgagataataatattgcatatgcttatcgcccttcaagcaagaagataattattaatccaagtaataaagctttaaaatattataataaacaagaaatattgcttcacgaatctggtcatttgatagattatgcgaaatataaatcttgggaaaataaaagttttactatttccactcagatagagaagaaagttgcaaagtgggatgagataaatgaattgttcagtcatgaaaaatgggcaaacgatgattactttagcgatatttgttcggcacttacggaaaatagagtaaaaggtaatgcaggacatgccgcttcatattggaaacgaaaagggagcattgaaaaagagatttttgcaaatttatttgctatgctagcaatgaacaaacaagaatcaattgctatggtaaaaaaacaatttccgatgatttacggatcgttcattaaaatgttagaaggtgaattgaagtgattaactacaaaaaatggcttgatagcatgatggccaccgaagacggaaaaatactttttgaacgttataaaaaactttatggacattacccgccattcttacttgacgcaacagagaaagaacagtgggatgaaattaaacgattgataaaagacgctgataaatgattcagtgtcttttttatgccaaaaattgaaaggtggtgagaatatgaaatgaaggtgcaacgatttgataaatcatttattacagattcaaatatgcaagttactaaagaaggttacttaactgttaaggcaccagtcactcgaccaggggtatttccttatcaacgagcggacggcagtattcagctggaagctaaattacccgaaaacctttttgctagcgaaactattcaatcgctcaatgcaaagccagttactaatgaccatccgaatgaaccagttaatgcaagcaatcatcaaaagtatgcaaaaggaacaacgcatacagacgcgtgcgtaagtgataataagctatttgtatcttttactattacagactctaagacaatacaagctgttcaagacggtaaacgcgaactgtcccttggctttgaatcggaagtagtaaaagaaagtggtacttatgcaggcgaaaggtacgatgccgtgcaaaaatctgtattagttaatcatttagcaattgtagatgaaggacgcgtgggtcctgaaattgcaatacgaggcgactcagctgcttttatgattgattcaaaaaacacgaaaaaacaaggaggaaacaaaatgccagtactcaagattgatagcaaagaatatgaagtcgattcagttgttaagtcacgatttgacgcattagaagcaaaactggatgcagcaaatgctaaagcagctaaagttgatgcattagagggagaacgtgacggattaaaaacaaagttagataaagcggaaagtgatctggaagaagctaacaaaaatacaatgacgaaggaagatattgaaaatgcggtcacagaacgagctgcattattagattctgctaaagtgatgcttggtgattcatttgatttcaaagggaaaactgctcgtgaaattaaagaagctgctattaaaacatcgaatgattcatttgattctaaagacaaatcagatgaatatgttaatgctttttatgatgcaatgacagtcacagcagatgctaaaggatatactgcagatgctaactttaataaaggcaaacctgatccaaaagagttagaagaaattgaaaagaaaaaagcagcgcgacaaaattttggtaagaaaggagataacaaataatgagtattccaactggacaagagtatatgatgcctgagctaggtttaggtaaaattgcttcttatcaacgttcgcaagttgatagcgcagcagtaaaaaaggatatcaactttggccaagccgttcaagttatcgatgacgaggctagcccattgactacaggtgatttttatggagtcgctgtggcaaagaattacgttgatgagtatacagatgataaagcaggtgtttataaaccttctgaagcggtaccggtgttacgacaagggacaatcacagttattgtggatgaggatgtgaaatctggagaaaaagcagttgttaatacagctacctctaatttcttaccttctacaacagcaaaaacaactaaaactgaagttattggagtatttaaatcaacaacgtcaagcgacggattagcaaaattagaaattaatctgccttaaaggcaaaaggaggaagaacaatgcaaggaaaaattacagcaacaattgaagcacgtgacttacaagctattgacaatgttatttatgaaccgaaacaagaagaattaaccgcacggagcgtattcccgcaaaaattcgatgtgaacgaaggtgcagaatcgtattcatttgatgttatgacacgttccggagctgctaaaataattgcgaacggagcagatgaccttccacttgttgatgtggacatggtacgtaagtccgtacctatctattctatcggtattggattgtcctatacaatccaagatttgcgtgctgctcgtatgcaaggaactacagtagacgctgcaaaagcgacaacagttcgcagagctattgcagaaaaagaaaactctattgcttttagaggagaaaagaaatatgcaatcaaaggggcatttgaagctacaggcattcagattgatgtatctccgacaactggtgtaggaaatgtttccaaatgggaaaagaaaactgcagaacagattattgatgaaattggcgaagctcatactaaaattactgttttaccagggtatggtacagcttcactaaaactatgcttaccaccgaaacagttcgaattaattaataaaaaacgttacagtaacgaagattctcgctctgtactgaaagttctacaggacaatgcttggttttctgctattgttcgtgtgccggacttagttggtattggtactgcaagttctgatagttttgcggttattcatgactcgaacgaaacagcggagttaattattccgatggatattacacgtcatccagaagaatattctttcccgcgcactaaagttccgtttgaagagcgtacagctggagtagtggttcgattcccagccgctattgttcgtgtcgatggtatttaagaattactaggaggaataaacaatgattattgaaaacaaaggcgactatgtacgttttttaggaaaagttagattagttccaggaacaaacaatattgataatgaacatgctgaagaattggaacaagcgcttaaacatccgcttaatatacacttgattgagtcggatgaattaaaagtacccgacaatttacaacaagattctagccttaatgatttcaatgctacgaaagcggcattgctagtcaaggatacttttgatttaggagccttaaacgaatttttagcagaagagactacaaacggaaatcggaaaactgtaatcgatgctattaataagcaaattgaatcaattagcaatccgccacaagaagaacgatatgttcctgaagaggattttggtgaatgagggggtaactcatgaaaacagacgttagtaagctcaaattaacggcatcatcattagcaagcgtctctgatgattctctacaagtacacattgatgattcatatttagaagtacaagaaaaaggatttcctgaaaaatttgaagaaagagcaaataggtaccttgctgcacatcttgcaacattagcaaataaaaatgttaagtcggaagcagtaggttctttaaagcgggaatattacgaagtcaaaggagattctggactgttgtctaccgagtatggccaagaatatgcaagattgcttaaggaagcaaatggcggatcaggaattagcatggtggtggtttgatgaaggtaactactgataaatctacaatgaacaaagcaatcagggagcttgatcagctagaccgatatagtttgcaaatcggtctttttggtgaagatgattcttttattcaaatgattgctggtgttcacgaattcggtttaaccatacgcccgaaaggcaagtatctaaccataccaacgccagaagctggtgataggagagcgcgagatattcctggtctatttaaaccaaaaggtaaaaatattcttgctgtggcaggtcctgatggtaaattgacggtcatgttctatttaaagaccgaagttaatattccggaacgttcttttttgaggtccacatttgatgagaaaagcaataaatggggagagttgtttgagggatggatagatgacgttattcatggaaagttaagcgccgagcaggtatataatcgattaggcgccaaaattgtggacgatatacaaatgaaaattgttgagattcaaactccggccaagtcagcagcgactttggccagaaaccccagaaaaaataatcctttaattgtcaccggtaaaatgaaaaatagtgttacttggaaggtgatgaagtcataatggaaaaaatgattttccaatcattactggatagttttggtgttccgttgacagtttttccaaagcaagaaaaaggtggagaattcgttaacggcgagtgggtagtaagtcagcttgacgaaacttctaaaattgaagttaatgaacccttcattccaagttcgctcatgactcaaatgccccaaacttctgcctacacagctgccaggtatgaaaaatacgaaatgatttggttttctagtcaagttctgccgttaaaaagcaaagtgatccataaagggattacgtattctgttgaagacgcaattcctttcactgactattcggatgtaactcagtatgggtgtaaggcggtgagtgttagtgccaaatgatactgctggttatgactatggaaaacttgttaaaactttgattaatgctgttaatgagctttcgggcgggttacaacttatcgaaagttctagtggtggggaacaaccagaatatccattttgccaatacaccataacatctccttacattgctatcagtcctgatatagtcgaaggggagcaatttgagattgtaatctcgcttacatggcgagccttatccggccatcaagcgttaaacttggccaacattacaaataagtatttccgctcccaaaaagggcgtttttttatgcaagaaaatgggggtattgttgttgtcagtgttcaaaacagcgggctgcgcgatactttcattagcattgaatatgagcgctcggcaggcattgatttgcggttgcgtgtagttgattcgtattcaagtgaaatacaagaaattgataatatcagctttacaaatgagaatttaggaggataaaaaaatggtagaaactattacagatgtaagagtacacatttctgtattgtatccctctccgcgaattgggttaggtcgtcctgcgatttttgtcaaaggaacggcgatgggttacaaggaatacactactctcgaagaattgaaagatacgtttgcagataatacagaagtctatgcgaaagcaaaagcagtgtttcttcaaaaagatagacccgacacagtggcagtcatcacttacgaggatacgaaattactagaagccgctgaagcgtacttcttgaagtcgtggcattttgctttgcttgcagagtttaaagctgcggatgctcttgcgttatcaaacttgatcgaagaacagaaatttaaatttgcggtgttccaagttacagctgtcgctgatattacaccacttgcaaaaaacacacgtactatagcaattgttcacagcaaaactggagaaaaactagatgcagcgctaattgggaatgtagcaagtttgccggttggttccgcaacatggaaaggccgtcatggacttgcaggaatcacatcagaagagcttaaagtatctgaaattgatgcaattcaaaaagctggaggcatgtgctatatcgaaaaagcaggtattgcacaaactagtgaaggaaaaactgtttcaggcgaattcatcgactccattcatggcgatgattggatcaaagcaacaattgaaactcgtcttcagaagctgcttacagaaacagacaaacttacttttgatgcacgaggtattgcgctgcttcaaagtgagttgactactgtcttaaatgaaggttttgcgaacggaatcattgatagtaatgatgagacgggggagcccaatttttctattactgcgcttcaacgttcagatttaaatgatgacgatattgctaaacgaaattacaaagggctatcattccgctacaaacgttccggggctattcattccgtggatgtatacggcgaagtggaagtataaaaggaggaataagataatgggcgaagtaatggcaacatatgatgcaaatacagtatcgacaattatcaacggaatttctatttttggtttttctgatggggatatggtttcatgctctaaagattcaaacaatgtagaaattaaatcagacgcacaaggtaattcgtcagcagctgttaataatgacaaaatgggtacaatcaaagttgatttagctcagacatcaccttgttatccaaagctgattgatatagcaaatagacagctcaaagttcctatttacgttattaacggaaaagaaaaaattggtgggtctatggcttttatcgaaaaattaccagacgcaggttttggtaaaagtgttgggacaaggtcatttactttcaaagtactagattatacacatactgcataaaatatattatactaagcgacctttttggtcgcttttttaggaggaaacaacaatggcagagaagaaaaataatgcaactaaaagtgatgtagcagcagctcaagcagcacaaaagattccgaaagtagaaaaaaaacctttggataaatttggaaaaaaagaagtattcaaagctagcaacaaggttgaatacacattccagttccctggaactcgcgctgcacaagcaatcttagacgagtctaagaatggctatggcgtgattgtggattctgtatattatgagcgaattatgaaagatgtaattgttgagcctttgggtttggacttagattattgggatgaacatgaagggtatcgcgaggttatgaatgcggcggataactttcttggtaaattgcttaactgagtttcctaacgctcgccaagctgaacgggaagtcaataaagagtttgatatttggcttcctatcattgccggtatagcaacgaaagaagaagttgaagttgctacatcatatgaattagcaatcttatgtgaggttgctagacaaaaaatagaactaatgaagggtggtgtctgatatggaaggcgcattgagaaaaacaacaatcgaaattgattggaaaatcaataatcaaatgttgcagaaagctgatgaggaaactgatcgcatcgttcgttctgcggataaaatggaacgaaacttcaatcaaacttctagggctgttgacggcaccacccgtgctatacataaacagtcaaatgaagtgagagagagtgcgactcgagtagataagcttgataagaattttaaagaagcaaagaactcggctaatcaatttgggaattctgctaagggtgcagttgataaaactaaaaactccgtagactcagcaaagaatagcgttaataagttagataatgaaattgataaaacaactaaaaatgctaattctaaattcagcgcactaaaaacaaccattattgcagttggtagcgctttggtggttgctggtgggaaagcaatgtttaattatgcatcagatacaaatgagtcattaaataaagtggacgtagcatttaaaggaaatgctgaaagtgtcaaacggtggtccaaaacaactctggataatatcgggcttgcgcaaggtacggcgttggacttagctgccacttacggcgatatgtcaacatcaatgggattgagcacacaggaagcagaaaaaatgtcgacttccatggtcgacttggccggaaacttagcgtcatttaaaaatattgatattgatagagcgaatacagccctaaacggcgtattcacaggtgaaactgaagcgttaaaaagtttaggtattgtaatgactcaaacgaacctagaacaattcgcactggaaacaggcgctggaaaagttgcgaaaagtagcactgaagttacaaagcaaaatattgcacgtgaaaaagcacaaaagaaattaaatgaagcgataaaagaacatggtaaaaattcgttagaagcaagggaagcacaaaataaattacaggaaattcaagctaaaacaagcgaaggcgcaaaagttaatttaaaagacatgaaacaagatgagctagtacgtctacgttataactatgttatgaagcagactactaatgcgcatggagattttaaaaacactagtgatcaagctgcaaacgcaagccgagtattttctgaatcagtaaaagagctagcatcaaatgctggacagttcttgctaccaatcattacaccgctaattatacaagcgagtgatttcacgaaaaaactttctgatattcctggagctgtaaaggggatgaaggagaaattcaagccggctttcgaggtattcgaaacagttggagatttcttcaaaaaagaccttatcccaagtgcgaaagaattagcgaaaagtatgggacccggtttcatcgagggtggagttttagcatttaaaggattaggcatagtattaaacactactgttattcccgcttttaaagcagttactaagtttacgcgtgaaaatccggacagcatgaaaaggattgctaagtatgcgactgttggtgtagccggatttttagggtttaagttagttaaaaatactatcgataaagtaacagttgctattggaaaaatgaacagcaaactattgaacattggaccgagcgctgcggctggtgcgacagaagcaaatgttgcgatgtcaactataggaacaaccagcaatggcggtggcggagttgtattgcctgggggaaaaggaaaagggaaagttaaacttttcagcaaagctactgcaggactcaaaggcatgggtaaattcggtaagttggctagcggtgtaggtgttttaggtgtaggattaagcgctactgagttgattggtatgaacaaaaataatgcaggtgaaaaaactggtggctttggtggttctttaggtggtatggctggtggtgctgcaataggaactatgattgctcctggagtaggtacagctattggtggggcaattggcgcttttgctggaactgcattaggtaaagaattagggaaatatgttcaaaaagaaggaccaaaaatattagataaattcaagacaggttggaaaggcttaagcaaaattgctgaagagcatccgattttaggagcaaatataaatgtaataaataaaactatcgatgcggcaaagaaaggcattaaagcagttggagacacgcataaaactgtttggaatgcttcaaaatcaatagtcgccgacccgctcaaaattgatgcgagcagtaaaggtgtttctaaagactctgctaaagcaatgaacgagtatttacgaaatgagcagaaaatgcaagatagtcgagtcgaaatcatggtatctggtcgtcgtattactgaaaaagaactcgaaaacaacataaaaacatatgataaaatgtctgatcagttaatagctgcaactgaaaaaaaatcagcaaaagcaaataaagattgggataagctagtagcacttggggctgtttctaaagatacagctagcgcaaagaaacacactaataatgaaactgcatcaataaataaagcggatattaaagcgaataacgaagaattaaaagctttagaaagagaattctataaagggcaagaagagattacacgaaatgctgaaaatagaattaatgctattaaacagaaagctagcaaagagaaacggaaattaacaaaagatgaagaaaaagaaatccaaagaatggaaacaacaacacttgagttccgtcgttctgaacgacgttcttatgaaaaagaagttagaaagattgaagaaaagcaaaggaaagaagctgctattgcactcactgcttcagctaaagaacaaaaaataatactaggaaacttagaaaactcgaaagaaaaaatgtcagcaaaagcagcagcaagtgttgttaaaaattccgcaaaagctagagatgcatccgtaaaagaagctaataaagagtataaacagactaaaaaaatacttgatgaaaaacgatttgtcacaggtgaaatttcagaagaagaatatcaagatgcgctgaaaaatgcgaagaaaaagaaaaacggcgtagttaaagaagcggagaagatgcacgataatgtagtgcgagaagctcagcaacaagcaaaaggacatttaagagaagtagattgggaaactggtgaaacattaaataagtgggagcaatttaaaaaaggaacagttgaaacatttaacagtataaaagatgcagcgctcggaaaatggaacgagttgtcctctgcgacagttaatattttcagtggaatgaaagatacagcgttgagagtatttgatagttttaagacaaacttgtataaagtcattaataatgtaattaccggagtcaataaagtactatcgttctttaacattaagacaatacctgtgcttgggaacggtagcataggttcaagtcaagaaaacagtttatctgcaaaggataagaaaacgtatcattctacatcccaatcaggaaatctagctatgaactatactggttctaataatgcaagtggccaaattatggctggtgaggaaggtttcgagattgcatataacaagaactcagcacaagcgagaattctaggggaaaatggtcctgagataaccactgtagcacctggaacaaagatccttaatcatgcggagtctaagaaaattatggctggtggcatgggagcaggaaaaatacttcctggattcgcaaaagggaatagcacaattggcgattttgtttctgcaagcgttgataaagttcaggcagctggcggggcaattcgagatggtgcctcggcaatgtgggactggatgtctgatcccgttggaaaagttaaagacttaatagcgaaaaataatacgtttaatggcgaaggtatacaagcgctaggtggaggtatagttaaatattttgggaatggagtaacaaactacgtaaaagataaaataggttcttacatgagctctagttctggattaggaccttccactggaggaacatttggaccacgcttcggctctccgttcagatttacgtctggatacggaccacgtgtggtttttggtaaatctgaatttcacaaagggatcgactatggcgcacctacgggcacaccgttgccggcgcaacattcaggtatagtatcattcgcaggtggtgcaggaggttttggaaacctgattaaaattaaggttgcacaaggagtagaaacactttatggtcacttgtccaagattttaacgtcgagtggtgcagttgtgagagcaggtcaaacaataggtttagtgggaagcacaggccgttcgactggaccgcatgtacactatcaggtaaatgcaaatggttctcctgttaatcctggaagtgcaattggaggaaagaaaaaagcatctggatcggaagatgtagctaaaattgcggaaaagaaaggtctagcattcagacggggcggaagaccaccactgaacaaacaagttcttgttggtgaggaaggtccggaattatttgaaactgatagccctggaatgattcatacagcacagaaaacgaaacaaatgctaaataaaagctcttcaggaacaacaatcaacttcaatcccacgattaacattactattgaaggtggatcgagcgaaagcgagtcatctattcgaaaaactgttcgagcggaaatggaaaaattattcgaaaaacttgttggaatttatactcctggagaggtgtgatattaatggtagcaacgttaggttcagtaaaattagtaaatacaaatgaaaacgagtcttctccgtttacaattacggataatcctgttgaaacaggtgcaaatgtttctgatcacgttcaacgtgaaacgaaaacactagaaattagtggctttttgcttggagctactgctgaaagagattacgctactttaaaagactatgctgagaaaggtactatagttacatttcggggacgtgtatatttcaaaaacgtactaattagtaatctatcaaaaagctataatacaataaaaaatggtttcgaaattacgatatcgctcagagatttaaggcgcgcatcgacgccctgggtgcgaaagaaaaagaaaagttcaggaaaaaaacaaccagtgaaaccaaaaaagcaaccggtcaaaaaaacaacagcagtctacgtgacagttaaatcaggggactgttattggaagtggtggaagcgatatggtacaagtatcgctcagcttaggaaatggaataagtggccagaccgtagaattccgaatggtgcgagagcgagggttaagtgatggcgattagaagttatataccagtggaacttgataatattcctgaaatctttgaatttgatttcgatagcagaagttatctatttggcattaattatgcagaatcacaggacgttttttcagttgatttatttgatattgaaggtaacgcaattgtattaggagaaaagttagtgttaaacgaacgactgtgggcagatgttatagatgacagattaccagcagcagatattgttcctttagatgaatcaggaaaagaagtatctattacaaaagataattttacaaaaacagtgtttttatattttgacgaattagctccgaatgttgattttccaacgttagaaggcgaggtcgatgtttaatgcaatggatgcgagaagtattcgtgtatatcgataatggatcagaatatgcgacgattcgagaaataaatgaagcaagtggtagcttgaaacttaattttagtatacctttctcagatgaaccaaagccttcagagtgcgaagttattatttataatttagcaccttcatctgtaaataaaataaaaaaaggttctgctatatctgttacagcaggatataagggtgatataggtttattatctcgcggaaaaatctcaaaagtatctactgtaccgagtggaacagacaaattaacgacaatcaaattcactgaaggtgtagattatgaagacaaaaaagatgtaaatattacctttaaaaaagggtcgtccgcaaaatcaattattcaaagagtcgcttctaaagcaggaattaaaatataccaaataaatcttccggcaaataaaatttataaatctggatataccgctgacggtgatgctctatcaattattgaagagattgttaaagactgtaaagctgcaatttattatcgacgtggtaacttgattattagatcaattaaaacaggtgatgatgagcgattcttgttaaattctgggacggggctgatatcttccccagaacgactggaaaatgacgactattccggttggagctttcagtcattgctacagcatcgaattgctacagcatcaattattactttaaaatctaaaacagctaatgggacttttagggttaaaaatgggacacatagttatgatggttctacttttacaactcagtgtgaggtggtctaagtggcacaagatacaaagttctttgattcatttattcgattagtaaattcaagtgtatcagtacttcttatgtgtagagtcgttaattatgatgcaagtaacaaacgagcggatgtgcaaccattgaatttaaagcccaacggagcaaaacgagcaatgattttagatgctttagtattaaagcataccgaagaagatattgcacaaggaaagatagtagctgtagtattttgcgattgcggaattagataacatcaatggctctgcagatttcatgactgacagcgctaggcaacacagcatcaatgatgccgttgtcgtaggagtgtgggatgtatgaaagatttactaataagttcagatggtgatttacttattgaacaaaatgagataatgatgacggatggcattgaagatattattcaatctgtacgtttgattttgctgactcgtaaaggtgagttttattttgatcaagattctggattggtttatgaaaacttgttttcaaaactgccaaactttgactatattaagcaagatattgttactgcgataacagaacaagaagagcgtgtatctagtgtagatagcgttctttttaattttaataaatctgataggaagctattcgtaagtataaaaatgactgcagatgatattcctgtaagtatagaagaggtgattttaaatgcttgatgaaaatggctttaaaagaaagacttttgatgagctgttgaccgacatggaaattaaagcaactgaactttatggagaagacgtcaatttgagtgcacattcggcgttaggtgtttttttaagaatcattgcctggttcttagcactatcaaatgaattagctgaacgtgtttataactctggttttatcggtacagctggtggagtgcaattggaccggttaggcagtaataatagtattatgcgtgatcctgcaatgcctgcagtagttgttttggaaatagaaggaaatcctggttatgttattgaagaaggagtccagtttaaaactaataatgacatagtttttgaaatgattgatgtgatcattcttgatgaaaatggccgtggttcaggacaagcaatatctcaaatttattcggataaagctaatgtagctgcaaatacaataacagtagttgctgagccgagtgaggatattttaaaagttaataacccactgggagctactggtggatcgaagaaagaaaatgacactacttatagagcaaggattaaagtagcgatgcaagcaagtcctggtcctccaatcaatggaattataacagcactaaaccaagttccaggtgttcgaagtgtttcagtagtcgagaataatagcatgaccgtagattcatcaaataatcctgcaaagtctgtgcatatttatgcctttggaggaattgaagaagaaattggggaagcgatttttaacagcgtggcagctggtgttcaaacagttggtaatattgctgtcaaagtcaaagatttatcagattttgagcatgtagtttattacgatagggctactgcactacaaatttatgcaggtattgatgttattgtaaactcaaaatttgaagaaagcggcgaaaatgatattaagcaagcggtgcttaattatataaattctttaaacatgggagaatcagtaatacattcatatatttatcctgaattatacaaaatagctggtataaagattgcaagtgtaaaaatcggaaaaagtgcagatactttagcttcatcagatgtggtggctaacattgatgaagctgcttctattcgctgggaagatattgaggtgacaataaatgtccgttaaagattttttagggaaattaacagatgcttttacaaagtcagaaaagagtaacatagggaaattatttattattgtagatcagcaaatttccgcattaactacggctcttgaaaaaacagaggcgtggcgagatattgataatgcgcaagggaaggtactgaataaccttggtgaaaatgttggccagaacagaggacgagctactgatgaggtatatcgtgttttaatccgtggaaaagttgcaagaaacgcaagtgacggaaccacaaataaaatcatccatgcaatcgcaaaatcattagattgcaattataaagatattcaaataatcaatgctaacgattctaattcatcagatgaacatgagccggcagcgataattattaaaaagattcctctttctgctctgaatgcagtcggcttaagtactaatcaatttttacagatagtaaacagtctgaaatctggtggtgttagagtagcatacatcaatttagaaggttctttttcttttgcaaaaggagcaacggaagagataagcgacgacggtttttcggagcttgatcaaattctgggaggaactttaggtggtttatttacaccagcagatgactttaagttaccaatttaaaagatagagaggcgataattatgtcacgatttaatgcgaatttagcaccctgggaagcaacgggaacaaagccaccagacagtaccattcaaaacggatggttggcggggactaagccgccggccgattggtttaactggtattttaatagcacatatacagcattgaaggagctacaagaacttgctgcattaaatgcagatttaataaatcatacaggaaatacaaataatccacacagtgtaacaaaagctcaacttggtttaagtgatgtagaaaattttggaattgcatctctggatgaagctaaagcgggtattgccagtaacaaactaatgactcctgcgagtgtgttagcagcaataaaagagcgatttaatacgcaaaatatccttttcgaaggtgcagcctggccttccggaaatacgtacaaattcgccaacagtcaaaaagtttctgatcaaaatttaggcttgattttcatttggagtgattatgacgtaatacctggatcagcaagtgttgcaaataattataactttgactttacatttatccctaaattttttgttgataagcatgccggagcaaacataaatgtgccagtcgctacaaatttcaatgctcaagtcgctcaaatcacaattaaaacattatatcttacagatacaacttttgctgggcacgatttaaactcaagtggcttaaatgcgaatgatgctattttacgctatatcataggagtgtgaataagatggaaatatacattactacaaataacgaaggttatttaactggctattcaacaagcgaatgtacgcctggtaaaaaaattgatatagacgaaaacgatgcctttttccaacgaggttttgccagttataaatataaagcgaatcaacttatatttgacgaaaataaagaaaaagagtttcagtatgaaaagacgctacaagaggcaatgttaagcactgaagagcaattactaacgacccaagaagcactagttgaattatacgagcaaaatactaaattagaacagcagttgattgacacacagctggcgatggtagacatgtacgaagcgaatttataggtaaatttttattgaaggaggtgaaaaaaatggctgtgatttatttgaatttgattctcaacggtaagaaaacattcaaagaagtaccacgcttactgcaagcgcaagtaaaagcattgttaattgacgcagattgcgctgaattagcagagtaataatcgttgtaacgaaggggtcgatggggtaatgaaaacaaaatggcgaaagtttatagatcaaatgcttgaaactaattacaaagaagtttttgcgttgtttttcttgttatcagtttcattttataatattctgactggtttttttttgatgacgtctggtgataaaattgttgaaaaaagcaagacatatcaactgatggacaatcttatgacaattgacacatgggggttgttgtttattttaagtgctgcactgatactaattgcatcttttcaagaatcaaatgcaagatttataaatttgatgattggcgggggaataggtgcgatagtgctgttcttatattcagcagcgagctcagagagtgctgttacaaatttattgcccagccgctatgctctaagcgcatgttttaatctatttgttgcggtaatggggggcttggaattatggaaaacgaaaaggaaaaaatagattatgtgtccagagcagagttatttgagcatggaattgatataaaaaaagagatgtcaagaaaagtcgataaagttgagagcaaagtagataaaatcggtgaggaagtagtagaactgaaagttctggtgattccgatggtcacgtcatcaaaagagacagctcaaaacacgcagaagatggcggacacacttgaacgatatacgcgatcaacaacaaagcagttgcacgaacatgacttagaaatcgccggcgtgaagcactcaatcgataatactttaaaaagtataagtgatgaagagtctgaggagaaacataagaagtttagtaatgtgcaaattataacttctgttttagctcttatagggataattttaggcggaattctaagctgggattggggacaatttatatttaaatgattgagggaggtgaactaaatgtcggagcaaaagcaaaaaaaagttaaatctgcatcagtgttacatgaagaaactacaaataacgaagttcaaactgaaaaaacttatgtagtaaaacaagatgaaaaattagcagggatagctacaaaacatggtgtatctgttggtgaattagcagaaaaaaacaaactagattcttataaattaaaagttgggcaagaattagttttataggaggaatatcatgaaaatcaattggaaagtacgaatgaaatcgaaagtgttttgggtatcggttatcccacttgtgctagtcttagcgcagcaattgctcggctggtttggtgtgacaattcccgcagatacagtcaacaagcaagcattagattttgtaaattcagtgttcttgctactaggtgtcttaggtgtagttaacgaccctaccacagaagggacagctgatagcgagcttgttcttaatagaaatagaaaggatgaggaataatgaaatttagtaaagggcaaagagtaaaagtagttgatacagatagcgtaaagaatgataaacagctagatgaaacagctaaaaacatcattgataaaagtaagtacaaaggaataatcacaaagacagttcgtggtgaaggagataaagatttattctttgtctctttttatattaatgacgaaagaataacgcaaggattccgagaaaatgaaatcgaaggggtggagtaagaatgactacagttaacggggtactctttaggcaaaatttagtctcaagttcaaagtataacatcaaagcacctaatactatgaagcccaaaaaagtcactattcacaatacgtataataatgcttcatcgcaaaacgagaccgattactgtaagaacaacaataatgaagttagtttccacgtcgcagttgatgataaagaagctattcaagtcgtgcctttcaatcgtaatgcctggcactgcggagatggtgccaatggtttcggtaacagaaatacaatcggtgtagagacgtgttacagtaagtctggaggagctaaatatatagcagctgaaaaaaatactattaaatatgtcgctggattgtgcgtgcaacaagatattatcgcctcaaaagatactattaaaaaacatcaagactggtccggtaagtattgtccacatcgtatccttgatgataaacgatggccagcagtgcaacaagcaattatagatgagtacaatcgtattacatctaaaaatccgaataggcacagcggacaggtcgttggcagtgcgccactattgccgaagacggattttaaatcaaatccggcgcggatgtataaatcgggaactgagttcttagtatatgagcacaatcagtattggtacaagacttatattgatgacaaattatactacatgtataagagtttttgcgatgttgtagctaaaaaagacgcaaaaggtcgcatcaaagttcgaattaaaagcgcgaaagatctacgcattccagtttggaataacacaaaattaaactcaggtaaaatcaaatggtatgcgcctaatacgaaattatcttggtacaataacggtaaaggttatttggaactctggtacgaaaaagacggctggtactacacagcgaattacttcttgaaataaatttaaagacctcttagcttagcgctagggggtctttttttgttatataaattcgtttttcttttctttcagcactgtaatagcgttttccagcgcttttcggacatctttttctatatctacatgagtttcactttcaaatcggttaaacgtaaaaggaagcacctctatatttacggactcaaactctttgattaagcagtataattcgaattcatgcgcaggaaaggagagtttatgcgtatctaacagctgcttaaaaccggcgagatcatccgcgtttttttctaagtcctctaattcaaacaaaacatccgaaatgggcataccggtgataagcgctagcgctcgtaatattgaaacagtgtatttatttaacgttttttcgttctggtcttttaaagtgttttgcgagataccagttaatttgcttaactgatacctcgttaaatcgtgtttttttaagaattcatctaatagttttattgacatatttttagttcaactcactttttataattacttcttgtttatcgtgtttttccttatcttcatctgtagctagtttaaaatcatcttcattagttactacaaagttaatataataagtttcatcttcaatatccaaacgtgtcgagtgaactaaagtttcatctaaatatagcttgtcatcatcgagcaggcaaagtgctactgcatacgcttcattttttgtaacagctaagtagtcagagtcattaagtaaatcctgcgaaaattctggtgtttgttctaattctttactggtaattgcttcaaattcattcatcgcgtcataatatcttttttgtgctgttgttactgtcattttaatcacattccttttctatattataattttttaagctgcagtttgtggaaacaagtcattgtgtagtttgactgctttcattgcacaagcccaaacacttaaaccgaaattcattttagtttcatttttcacactagtgaatttttcatcatctgaaatattaaagtgtaagcctaattttcgttcagcccaattccacgctttaagttcttcgcttttagagatgtgtttgatttctttttctacttctttaaattcttcttttgctttagaccacgcggcctttaaacatacggagaaagttttttctttgtctgtgtaacttacccattcgatatcacttaaccaaacattgctatcagtgaaccagttccaagcttgtttcataatttctgccttgttaaacattgtgtattcctcccgttcctttactatatacatattatactacgaataaccgtagtagtcaatggttttattaaatttattttaaaataaaaaaataccccgaaaaattattcgaggttgctgttattttcatttatttttaaagggatgtcaaacagctaaatgagatgaatgaaataattgagtgaacgatagtatcgttcatgtgaatattattacataagcgttttaaatttacaagactaaaaaattacttttccacttgatttcaagaacgtttgttcctataatgttaacaagaggtgaagaacatgtataatttaattgatgatattttagaacattcaatagtgttagtagatgcgttaaaaagaaattgttcaatagaagtactgtttttaaagaataatcatcatgtgcgttacaagtatgtagttcctgtatacatcgacaacaaaaaacacattgtatcacttgaacgctttgacgagcgaataattgatattaatttagacgatattattagttgtgagattatgtcatgagaatatatagctttaatgattttaaatacatttgctatattgaggggaagaaaagtgcggtagagaaaattttttctgaaatacttgaaacgaaaaagttaaaagcgttttgtaagaaagtagaaaagaatgatattgatttaaaaacaatttataaagaatacttagatcagtatttttgattgtgataaaaggcgtgatgatttatctatatattatagaagaaactcgtcatataatgtcatatagtatcatatcaataaaaagcgttgtgggatttttgtgggataaaaactagtgcaactccaaaattgttgttgtaccaacatgtttaaaaacttcttatgttccaagtgaaaaaataagtaatattttatgaatatcaaactcctgcaaccctatatggaatgcaggagtttttttattttaaatttatttagatagtttatcctgcgtgtgttttttgctatacttagaaggtacaataaaactaagggagaacagcatgaaaaaaatcatcaagtttatttttgttactttatttattttatttttagtagattgtttatggacaatgattcaaacaaaagacggattagattcacctctttggctacaaattgtttatttattagcttatctagtttctgcaattggtgcctataaagaaaagtggttcggtttttttatcgcatttttatttggagttatgattatgatagcaagtattattatcactttataaacaaaaagtctcgatttaattatcgaggcttttttttgagaattttaatatactacggatgaatatttatacattttatatataagaatttatatatataaagggattttggtattggttcttaaccacgaaatccagttccttgaacaatttgtcatatttggaacgttggttgcataaaatagtgaaatacactcaaaataaggtgaaataatagaccaaatagacgattcgtttcaaaaagtgtaataataattctaatttaagcctgattttagtcgttcatgacaagaatcggctatttcattacatttttggttatacattcgctatccatgttacaatttttttggagggtataaagtttagaaatgaggcgttcaaggttggaaaaagggatgacgaacattaaaagaaatatttataaattacttttatttttacttagtttgctagtagcttttattgtatatttccgtatattttataatatcttacccatgtactttggcaatatggagagcttgaataaaaatgttttagcttttgggattgtggtattcacactatacattttactcaaaatggtttttaagcttcaaaataaatgggatggatatttattactcttattgtatttattcgttttaactatcggcttattaagacctgatgatagtgtatctttagagtcctattttaatgtcaatgtgatgcttattttggaagatttacgcgttaatgaagcttcgtggtccgtacttttaattaatttagtgttattcactcctatgtattttctgctaagctttgttccatttttggatgattttctaaagcgctttattgccttttttactttgattttagtaatcgaaagcttgcaatctatattaaaagtggggatgtttgatgtaaccgatttgctattatatatcatcggatttttcgttggattcggagtttactgttgtataaaaaaggtatttagagcacaaaagcccagaaactcgagccaattttaaaaatttagtacgtacgaaagcttgttattatttaaatagggatttcctatttttatgatatagtttgagagaaaagggggagtattcatcacgttaggaagaaaaaaaggtatacgtattaactaatatgtttactgtttcacttgaaaaattacttacaaagaggagcgacacagaatgaagaaaattttatcattgttagtagcatttatttgcgtatggagtatggttatgccaagtgtggaagcgagtgcggcagctaaaattattacatgggatttagtagatagtagtaagcatttagattactcgggtaattcgaagtatatgtcttttataagatcaggggccaatacttggaacgcctataaaaagggagtaattagaccagcttctgcgcagaataaatctgatgtttattgcagtgatgtttccgtcaataacaatgttaatgctactacttatagcaatggaaaaattacttttaacaaaaaaaatatggataaaaaaaataatgctggtaagcaaaatgtagcaacacacgaattaggtcatggtttgcgattagctcataatgcatcctctgatgtgatgtaccaatatagtacttccaagacgagcttatctacgaacgacaaaagatcttatgatgcagcatataaaaaatattaaaaaggggtacttaagatgaaaaagacaactatgggaataattgcttcaacagtaacaattttaggtatcggttgcttgctaacagtaagtacatatgcagaaaaaacagaaccaaagaaaaaagatgttccaacttatgccattcattcagactatacactaaatatcgataatccaaatgaagttgttggtgatgcggattatgtgtttgtcggaaaagtaacaggagagagcggaactatttataaaaataaaacgccaatcgaacaagaagatggttcggtaaaatatatcggagaagcctacacaaattataaaatcaaagttatttctaatttaaaaaatgaactggcaacggataaagaacttgcgatagccaaacaaggtggtattcgagaggacggttctgcctatgatatatttgaagatgacatactgccagatgtaggaaaaatttatatttttactgcttatacgcaagatgatggttcattacttatttcaggtggtaactctacaatagcattcgatgaaaaaacaaaaaatatcgatacagcaaaagaagttacgcaaacagaagaatatgaaacatatgaaaatgccgtagaaaaccaagtgaaaatagaagaaaactaaatagaaatgatcaaaaagcataacggtgcttactaagtatcgttatgcttttattgtatatagctgtattttttcttaaaagtaatcccgaaatacaaataatttttaaacaatttgcaattatttgttgcgctttcaaatgaaatcggttaaactaatatcgttgcataataaaacaaaggaggaatggacgatgaataattatattacgacttcaaacatggcattattgcgcttaaaaatagaatttatttcaccggaccatttcgcgagcatgggaactctcctttaagttggttttattttatacaaagtggtgacaaataaatatattttttcgggtaataatgggcagaaataggtccattatttttatttgtccaaatttaaggaaaaaagggagggatagttgtttgaaaatttttaaagcattaagctggttttttaaagaaaattggaagtcttatgcgtttggggtaacaattttatttacaattgcgcttttgcagttagtaccgccgcaaataattggctacacggtggatgcagtcacaaatgactcactgacaaaagaaaaattgattaaatggatgcttattctcgttgtagcagctgttcttgcttacgttggacgttacgtttggcggatgttgattttcggttctgataacaaattacaacggacgttacgcttacgactgttcgaacattttacgaagatgtcaccatttttcttccaacgttatcgtactggggatttaatggcacatgcgacgaatgatattaccgctattcaacaagtggcgggaattggtgttttgacattatcggattctgtgttaacaggaggaacggttattgcaaccatggcgattacgattgactggcgccttactttgattgcattacttccaatgccgtttatggtactcggaagttcgattttaggtaaaaaattacatgatcgtttccatggggctcaagctgctttttcgatgttaaatgataaaacacaagaaagtatttcaggaattaaagtcacacgaacatttgggcaagaaaaagaagatattcaagattttgccaaacaaacaaaagaagtagttcaaaaaaatatttcggttgctaaagtggatgcgatgttcgatccaatgatttcgattattgtagggatttcctttgtgctttccttagggtttggagctaaattcgttgttgacggagaattgactattggacaagtgattgctttttcaaactatttattcttactcatttggccgatgttagcatttggatttttatacaatatcattcagcgcggaaatgcttcttacgaccgtgtgcagcatttgcttgcggaaaaagaagatgtaattgatcacgcagatgcagtagatgttacgccagaaggtaatttacatgtggaaattaatgcatttacgtatccagatgaaagtgaacccgtattgtcagagattggttttgacttaaaatctggtgaaacgcttggaattgttgggcgaactggttctgggaaaacatcgttattaaaattattaatgcgagaatatgatacgtacgatggcgaaatttcttttgctgatgtaaaaattcaagattacactgtacgagctttgagagaagcaatcggttatgtgccacaagatcagtttttattctcaacaaccgtgcgtgataatattcgttttgggaaaccagaagcacctcaagaagaagtgagcaaaatcgcgcaacttgtatccgttgatgaagatattcttgggtttgaacatgggtatgatacgattgtcggcgagcgcggagtttcactttctggtgggcaaaaacagcggcttgccatcgcacgtgccttaattatgaatccagaattgctgattttggatgatgcactttcggcggtagatgcaaaaacggaagaacagattctatctaatttaaaagagaatcgttctgataagacaaccatcattagcgcacaccgacttagctctgtggaacatgctaatttgattattgttattgataaagggagaattgtggaacgaggaacgcatagtgagctaatgacgctagatggctggtatgcagaaatgttccatgagcaacaactagaggaagctttaggagaagggggtgcggctgatggaagtgatgaatgaacaagacgaaatgttagtgatgtccggtaaagaacaccgtgcagtattaaagcgaatgcttagttacacaaaatatcatattccaagtttgatttggactggaattcttgttcttcttgtaacgcttgcagatgtattcgcgccaattttaattaaaatattcttggatgattatttaacgccaatgaatttagaaatgcaagctttgttaattttaggagcggggtatttagggctgacaattgggaaatccattgtgtggtacttccaattgctttatttccaaaaaatcgcgcttgaaattgtgcagcaaatgcggattgacatttttacgaagcttcattcactcggcatgcgttattttgataaaacgcctgctgggagtatcgtttcgcgtgtgacaaatgatacggaagctgtgaaagatatgtttattaatgtgctttcaactgcgattcaaagtttgtttatgctcgtagggatttatgcggcgatgtttgcgctcaatgttcagttagcgctttatagcttgctgttattcccacttattgtctttattatttttgtttaccggaaatatagttcccagttttaccgggcaagacgagaaaaattaagccaattaaatgcgaaaattgctgagtcgatttcagggatgtcgattgtgcaacaatttaatcaagagcgccgtttagtaaaagaattcgagcacatcaacaaagactattatgatgttggaatgaaaaacattaaatttaatgcgctattacttgggccagccattgacttgatttacgcgctagcagttgtgattattcttagctttttcggggctgaatctttaactggtcctgtagctatcgggacaatttatgcgtttgttagttattttgatcggtttttagaagcgatttataacgtaatggaacgtttggctatgtatcaagaagccatcacagcagcgtctagagtatttcgtattatggatgaaacagaagaagtcccagctcaattaaatgatccagaagcaaaaattactcgtgcaaaaattgagtttaaagatgtttcgtttgcgtatgaaggcggacgtgatgtacttaaaaatattagctttacagcagaacctggtcaaacggtggctttagttggtcatacagggagtggtaaaagttcgattatcaatttaatgatgcgcttttatgaattcgagcgtggcgatattttaattgatggtaagtcgattaaatcccatgaaattgctgaattgcgtaagaagacgggacttgtcttacaagatagttttatgttttatggcgatattaacacgaatattcgtctttatgataaaaacattacggatgagcaaattgtggatgccgcgaaatttgttcaagcagatggttttattcaaacgttatccgatcaatatcaacataaagttattgagcgaggtgcttcattttcaagtgggcaaaggcagttgatttcttttgctagaacagttgtgacgaacccacaaattcttgtgttagatgaagcgacggcaaatattgatacagaaacagaaagcttaattcaaactgggttaaaacgaatgagagaaggacgtacaacgattgcgattgcgcatcgactttcgacaattaaggatgccgatttaattttagttttatctaaagggcgaattattgagcgtggtacacatgattcattaattgcagaacaaggtgtatatcactcaatgtatcaattacaaaatagcggaatggatttagacgaagcgctttaagcagagaagtttatttcaagcggtaaaaggaatataatgaggagcgaagtgttacagcagataagtagggggaattaatcgtgtcattagtcatttcaattatcattacacttgtttttggggctggaattatcatgataagaatgaaagcatcgaagcgtccagcaagtgtgaaagggattatcataccgccaattatgatgtcgacaggcgcactcatgtttgttattccttttttccgtgtttcggtagtagatattttagaagcaattgccatggggctagtgttttctgttattttaatttggactacaaaattcgaagttcgtcataaatacgtatttattaaacgcacgaaagcttttccggttattttgatgggattattgcttattcggattttcattaaatattggattagcggcagtttggaagtaggcgaattatctggtatgttctggattatggcgtttgcaatgattgtgccttggcgaatcgttatgtatttccaatataaaaatacggaaaaacagctaggtaaagtagaagttagtggcgagtacgaataatagtgaaagcattttccaaaacagcttgaattatctagtatgaatagcttataatgaataatgttacatcgtgagtaatgttacttgccggatgggtgaagcatatccgagactgacgcggccagttacaaaagggcttccgagtttggcttgaaaaaaaggaggacatcatcttgaaaaaatggttattagtagttttaactttagcactaggattgtcgcttgcggcttgttccggttctaatagttccgacaaaaaagaagacacaaaaaaagaaacatcaaacgttaaggacgacgtattaaattattacatggacttagtagacgttattaatgaaaacaatggcgattacaacgcttatgtaggagcggttggcgcagatcctaaaccatctgaagcagaccttgctgctcttgcaaaaccagctagtgaatcagcacttaaagtatctgaaacacttgctagtgaaaaaacaccagacctaggtaaatacacagatgatttcaaagcagctgtgaaacaattaagtgatgcttataaattagaagcagatgcacttaaagctagtggtcgtgacacaacaaaagcagacgaagcgatggcaaaagcggacgaagcaattgctggcgtattaaaagatgctggacttaatccttcaagcattacaactgatacagcttcctgataataaaaaagacagtttccaaatggaagctgtcttttttattatttgttttttgtttggttaatttcattttgaagttgttcaaatgtcgccattaattcttgagacttaacttctagtagctctttttggtcaagttcggtatcattgaataataccggatcgccaaaacgaataatgatttttttgcgttttaaaatttctccaaatgttttgggtccatcataaacagcaggtagcattggaacttttgctttatgagcgatagttacagcaccacgttttaaatgaaggttggttgtttttcttgtaccactagggaaaataccaactactttaccagatttaagcatccgaatgggagctttaatggcacttggtccaggattatcacgattgactgggaaagcgttaaggtgcgtcattagccagttgaggaattttcctttgaaaagctcttgtttcgccatataatgtactggtgttggcgacaaagcgaaaccaagatataagatctcaatccaagacgtatgagtggaaactacaacataaggcgcttcgataattttctctttgttttgtacttgaaatcgtccaccaataataattaaaataaaatgaacgaggttttttgcgaaatgataaaacaacttcttcactcccaatattgctagttatttttttaaactatatctagtatacttaaaaatgacgagttttgcattaaaaataaataatctctgagaaaaagaaaagaggaaaacgatgaaatttttacatacagctgatttgcatttagggaaaattgtatctggcgtatcgatgctagctgagcaagaatatattttggcacaaataacgaagattgccgaggaagaacaagttgatgcgcttattttggctggagatttatatgaccgtgctgtaccgcctgcggatgcggtgaaagtgctaaatgatattttagtgaaatggaatgtagaactaggtattccgatatttgcgattagtggtaatcatgatagtgcagagcgactagcttttggcagtcagtggtacgaaagcagcaagctatatatgaaagggaaatgtacttcgcagtttgaaccaatttcgtttatggatgcggaagtgtggcttgtgccttatcatgagccggcaattattcgtgaagtcttggctgatagttctattcgtagctttgaggacgctatgcaagccgtgacgaaacaaattcgaacaaaatggaacccagctaaggcgcaaattttagtaggacatgcgtttgtttctggcgggattcctagcgagtcagaacgccaacttgcgataggaaatgtggaccgagtttcaacgaactgttttgatggatttacttataccgcgcttggtcatttgcatcacccgcatgcgattaatcatcctgctattttttatagcggatcgccgttaaaatattctttttcagaaacaaaggataataaaagtgtgcgcattgtagaaattgagggaaatgaacttattagtgtaaaagagcgatttctaacgccgaaacatgatatgcgcattatttctggaacactggcggaacttacagaaaacttagtggaaaatccaaatgatttctttcaagttaatttaatggatgaaggtgctttaattgatccaatggggaaattgcgccaattttatcccaatattttacatttagaacgtaaaaagcaaaccttaaaagaaacgcaagataactttgaagaaatgatgaaaaaagatgatttagagttatttgggcaattttttgaatatgtaaatggtacgaaattaacggagacgcaacgacaaaaattagcagatgtgtttgaagaagcgcgaaaggaggatactgaatgagaccgataaaattaactatgcaagcttttggagcttatgccaaaaaagaagtaattgactttgaaaaactaggaacggaacaaattttcgtgatttctggtaaaacaggggcggggaaatccactatttttgatgcaattagctttgcgatttttggaaaagcaaacacattcgatcgggaaagtttttccatgcgcagccattttgcgacggacaaagaaataacggaagtaacgcttgtgtttagattgaaagacaaaatttatcagatcagtcgtattcctcaacaagaaattgctaaacaacgaggaaatggaacgacaacttctcctcaaaaagctgaattatacgaactcataggtgatgaaatgaagctccttgcgagttccgttagtgatgttaatacgaaaatggaagaattaattcaacttaatgtggatcaatttagacaaattttaatgattcctcaaggggaatttagagaactactcgtatcggatagtaaagaaaaagaagtgattttgcaacgattagcgcataccgtgtactatgaaaaagttgaaaatttgctgtgggaaaaacaaaaagaagcagaaattttagttgtcgaagcgagaaaaaaagtcgccgagcttgccgaactcagcttgccaggaatagaaataaccggcaagacaacaactgaaattagtttgctgcaaacagaagctatcaagcaagaacaagcaattttagcagagttagaaagtgctttaagcatcattcgtaaagaaacaagtgaagcggttgaaaaagtgactcttgcgaaagaacaactgcttgattggcaaaatttagatttatatatagaagaagtagctaaattagaagctgaaaaagatttttatcaagtgatagcaaaccgaattgaagcagctaaaagagccagtaacctgcgttctcaggatgcgctttgtatccgtttaaaagaacaattagaaacagcagtaaatactgaaaaacaagtagcgcatgaagtagagttgataacaaaccaattttcaaatgcaaaaaaacaaaaagaagcactcgccgaacaagaagcagtactagaagctaacaaacgcacactttttcaattagaagaaatggaaccaaaaatcattgaattagaaacagtaacgattcaaaaaagacgcgcagaaattaattggaaagaagcagcggatcgtttagaaaaagtgatgaaaacagagcaggaaatcgcagcagaactacagtcaatggaaactcgtttaggagaaattaaccaagcagaactagcgattttagaggctattaataaacgaacaactgccgaagctctcattgaaaaaaatcaagaacttgttaataaacgaatgaaaatggatctatggaataaacaaaaacaaacagaagaacaaacgctaaaacaacttttaacagaaaaattagctatagaaacaatgattaaacaagaagaatcaaatttacaacaagaacaagctgcaacactcgcagctcatttgcacgagggtgacgcttgtcctgtctgcggatctgtgtcacatccacaattggcagaatacggggaatcagccagcctcacaacgctagaagaggcaaaagctaaactacatgaaaaacaattagcgattaatgaggttgaaaaatcaatcagccaacttgaatggcaattagctgaatgggcggatatagcagatgtggacttagttgcagtagaaaagttattagcagaaaaccgccaattagctaaaaacctaacagatcaaataaatcaattgcaaactaacgtggcgcaaaaagaaaatattcaaggcgcacttgaaacattaaaaaacaaacaaaaagagctagaaacagaaaaaaataatacggctcttcaagtagaaagttttcatcaagaagtccaactctcatctggaaaactaagctatttagaacaagcaattccagccgatttacgagataaaactatttttgataagaaaaagaatgaattaagtaacagcattaaaacgcatctggaacaagccgaacaagtggataaaatatttagagaagctgaaaaagaaacaactaggctggaatcaacattgcaatctgccgagaacacaacactggacgctaaagaagcattacaagtccaacgcgaagtttttaaagagtcaatgaaacaaaatgattttcctacttatgaggcttataaacaagctttaatgtcagtagaagaactaaaaagtaaagaagaacaactagctgactttgagcggaaacgccatttagctatatcacgccaagctgatttaacagaaaaactgaaaaacaaacaaaaaccaaatatcgaacaactagaatcatttatgaccgaaaaacaattagaacttgctcagtcagaagaaaacacaattaaacaacgcgactttgttttgaaacgaaaagaacttgccgaaaactatcaaaacagtattcaagcagtagaaaaagcagaagaaaattatgcggacattggcttattagcagactcagctcgtggtaaaaatgctagaaggctaacatttgaacgttatattttagcgatgtttttagatactattatccaccgagctaatcatcgtttatctaaaatgactagcggacgttttgaactcaagcgaaaaatcgaaaaagcaaaagggaatgtccaaagtgggttagaacttgaagtttttgatgaatatacggggctgacgcgtcatgtaaaaacactttcaggtggagaaagctttaaaacctcgctagcacttgctttgtcgcttgcagaagttgtccaagaaatggctggtggaatttcactggaaaccatgtttattgatgaaggatttggaacgcttgatccagagtcattagaggtcgccgtagaatgtttactggaaacacaagaaaacggccgcttagtcgggattatttcccatgtgccagagctaaaagaacgcatttcagcaaggttagaagtaactgcaactaatcacggaagtacaactaaatttattactgctaatagctaaaagaccgcttgcgttgccgtcactcgtcttttcctatataatagtagtttagagtaatggacggttttgggaggaagaaagtaatggagcactttacagcaattcaaaataaaatgattccatatagtgtgaaacaggctggaaaaaaactgatggaagacggagaaatcattcagtttcgtgaaaaagacgcatcagaccattttttaacctattttattgatcaaaatgtcgtagaagatgctggtagtgaaaattatgcttgtagctgtgccgattttcagctaaatgctatttgcaaacatatctacgcgacacatttaaaaatggaaaaagaaaaacaaaaagcagccaaacaagattttaaaaatcgaattctcacacaagaatcaaatacacttctttccctttttcaacaaaatatggcgcaacaacttgaagtggaagaggatattactaataaaataccacttcaaacacaatatatcattcgcttaaaacccgatgattctagttatattatgacaattgaagtcaaagtagggacagagcgaacatatgtagtaaaaaatatgaatacgtttttagctgcgattcgtgatcggcagtggcttgtatttactaagaattttgcttatgatccaaacgagcatttctttttggaagaagacaaacaaattttggacaaattacttcaaatcagtgaaattgccaagatgtatgatacagattctttctactggtcaaaatcctatgcggaagagaaaaatctaactattccacctagtatggctggtgaactattagaactcttaactgagcgcgacacgacttgtattattatgaaagaacgcgtagaagatattaaataccgcggcatcaacgttcgccgcgataacctagactttatttttgaacttaaaaaaagtgcggatgacaaataccaactagaaatggaagacttacaacaagcaatctttttcgaagcttatcagttacttttctttgatggtacttttttcattcctgttaaagaagtttgggaatctttaaaaccgttaattgagtttcacaaagttacgaaaaatgaagtggtgcagttttcggagtcgcaattgagtgaagtgatttcctatgttttaccagctttacaaaaaagtggtaagttgaaactggacgactcgattgaagaccggattacacagcaaccacttgattgtaaattatttattgcattggaatacggagagcatacattacgccttgaatatcattatggcaatcaattatttgatccatttgcaattacggaagaagaaaacgaaaaaatcatgattcgtgatgtggaaaaagaagcacgcgtgatgaatattatcgaaagcgctcctgttcatttttcaggaacaaaaatggttgttaataaacaagaaaaggatttatatcaattttactatcgaaccattccaaaacttgccgagtatgcggagatttatatggaagatggtttagaagaaatggtagaagacaacgtgcgccctgtgacaacgctagatgtttcttcagataatgattatctttctgtttcgtttgatttcaaaggcatcccggaagaagaagtccaaaatgtcctagaatcattgcgagaaaaacgtagctatcatcgtctgaaaaatggacgtttcttatcgcttgaatcggaaaactataaacaaatggaagacgtactacaaatgttagaagtgcgtaaaaaagatgtccagccgaatatgcaagttccgctttatcgaggtatgcaaatttacgatattttaggggcgggaacgcaagatgaacatcataaattcagccgttctttccgtgaactactgacagacataactactcaatcagaagacagttttagtttaccaaaaggattaaaagcagagttgcgtgattatcagttaacaggttttgaatggatgaaatcacttgctaaatataatcttggtggtattttggcagatgatatgggactcggtaaaactgtacaaacgattagcttcttggcatcagaattagaagagaatccgaacttaaaaccggtcttaatagttacaccagcctcactgctctacaactggcaaagtgaattagaaaaatttgcgccagaaatccctgtgactgttttacatggaacgaaacaggctcgtatggcagaaatggaagagataaaacacggtcatgtttatttgatttcttatccatctttacgtcaagatattattcatttcgctgatgtagctttttcaagtgtcattattgatgaatcgcaagccattaaaaactaccatacaaaagcatctcaagcggtgcgagcgcttaaacgaaatcatgtatttgcgttaagtggaacgccgcttgaaaatagtattgatgaattatgggcgattttccaaacattaatgccaggatttttcccatcgctacgcaaattcaaagaaataccatacgaaaacattgccaaaatgattcgtccgttcttactgcgcagattaaaacaagacgtagtaaaagaactacccgataaaattgaaacaaacctttattctgaattaaccgatgagcaaaaaacaatctacttagcttatttagagaaaattcaagctgatttagaagaaagtaatggcaatgcttcggaagaacgaatcaaattactcgcgggattaacccgtttacgccaaatttgctgtgatccgagcctttttgtcgaaaattatcaaggtgaatctggtaaattactacagttatttgatacaatacagacagcaagagaaaacggcaaacgaatactgattttttctcagttcactggtatgcttgcgattattcgccggaaattagaagaagatggtcaaccccttttctatatggatggtaaaacgcctgctaaaacaagattagatatggttaatgcttttaatgaaggtgagaatgatattttcctaatctctttaaaagcaggaggaaccgggctaaatcttgtgggtgcagatacggtgatattatacgacttatggtggaatccagctgtagaagaacaagcgacaggacgtgctcacagaatcggtcaaaaacgtgtcgttcaagtgttccgaatgattacaaaaggaacgattgaagaacgaatttttgacttacaaaagaaaaaacaagcgctcgtggatgaacttatccaaccaggggaacaaatgctaggtaagttaaacacagaagaaattaaacaaattttacaattggataatggaagggatgacaaataatgaaaaagtgggaagtattcgcagttcaaaatgtaggcgcagcagaggaaattatcaacaagttagtaagtgagggctatgaaaaagaagatatttctgttttagctaaatctaaacataataaaaatctcgaaacattagcggaaaaagaaaatattgaaatcgaacgtccagttaatgaagaggcgtttggcattatctctggaatactgcaatcacttagtggcgcaattgttattccacaagcttataatccgaaatacggcgccctatatgcggcaggaccttttgctaaatggttctcaaaaacagacgataaatctgttaaaaaacttctagaagatttcgacttaacagaagaacaggttgataaaatgattgaaaatttacatgcagataacatcttaatttttgcgagatagtatcggtgaaaaaggagaagtttatgcaaattaaagaatttttgattagtcgtcgttcagaggtagttaacaatttttacgataattattatactcaaacggatgagtataagttgaggcttagtgctggtgaggatgaacaatctattcgctcactaagtaccgcatcgtgtggcatgattattgatgtcattacgggagtgaaagaacgagattttgaaaacatcggtaaaagacgcttcaatgacaaaacggacattagaaaaatccatcaacatatgagcgaaattgataaatttattataaacagcttacttaaatggaaagaaactgaagatgttttttatacggatgctgatattattcagtttatgttagaaataaaagacacactcgcatccattcaacagcagcttcttgaaggatttatgcaagaaaatagaaatcaagttatggctcagcgcaaagagattatccaattatcgacgcgtattattccgattactgattccatcggagtgttgccaatagttggaagtttagatgatgatcgaggctattttatgaaagaaaaagcaatcgaatctgcggataagttaaatttagacttcatcgtaatagatttttctagcgccgtgttaaaagatgattttgcaacaaaacacatggaagatatgattcaatcatttaaattgattggattaatcccgatactttctggtatgcaaccaagctttgcccagcgcacaattcaggttggttcgaatatttcgaaactccaatcatttggctccctagaacaagcattaaccaatttaggtctataaaaaaaggtgaatggcacttcgttgtcattcatttttttgttataagaaaaagttattgaattatagcgaattctctttgtttacttatcgcttatttttaagtacaatagatgagagagaccagtcgtttcaagaattgaaggaggaaacgtggatgactaattggaaagaaaaagcaaaagcatcatttaaacttaatgacaaaacgtatcattactacaaaattaaaaccttagaagaggacaaaatcacaaacatcgagaaattaccttattctgtacgtgttttacttgaatccgtattaagacaagctgatggcagagtaattaaggattcacatgtagaagacctagctcattggtcaaaaaatggtaacgaaggagaagttccatttaaaccagcgcgtgttattttacaagatttcaccggtgttccagcagttgttgacttagcttcattacggaaagcaatggctgacctaggcggcgacccagaaaaaatcaatccagaaatcccagttgatttagtagtcgatcactcggtacaagttgatagttatgcgaatccagaagcgctaaaaatcaacatggagctagagttcaaacgcaatatggagcgttatcaatttttaaactgggcgcaaaaagcatttgataattatcgtgctgtgccacctgcaactggtatcgttcaccaagttaacttagagtatttagcaaacgtcgtcatcgcgaatgaagtttctgacggcgaatttgtagcgtttccagattcccttgtcgggacagatagccatacgacaatgattaatggtattggcgttttaggttggggcgttggcggtattgaagctgaagctggaatgctcggacaaccatcttatttcccaattccggaagttatcggtgtgaaattattaggtgctttaccaaacggcgcaactgccaccgattttgctttgaaagtaacacaagttttgcgggaacaaaaagtagtagggaaatttgttgaattttatggtccaggcgttgcaacccttccactagctgaccgcgcgactgttgccaatatggctcctgaatacggcgcaacttgcggatttttcccggtagacaaagaagcacttaactatttaaaactaactggtcgtgacaaagaacaaatcgaattagtagaagcttatttagaagcaaacgatttattctttacaccagaaaaagtagaaccaaattatacacaaacagtggaaatcgatctttctgctattgagccaaatctagctgggccaaaacgtccacaagatttgattccgctttcgaaaatgaaagaaacattccgtgaatccattacagcgaaagcaggcaaccaaggtttcggtcttgataaatcagctttagacaaagaagtaactgttacatttggcaatagtgaccaatcaacaatgaaaactggttccgttgctattgcagcaattacaagctgtacgaatacctctaacccatacgtaatgctaagcgccggtttggtcgctaaaaaagctgttgaaaaaggcttagaagtacccaaattcgtcaaaacttccttagcgccaggttccaaagttgttacaggctacctggaaaaagctggtttacttccatatttagaaaaacttggctttgacctagttggttatggttgtacaacttgtatcggtaactcaggtccattaaaagaagaaattgaagaagcgattcaagagagtgatttactagtttccgcagttctcagtggtaaccgtaactttgaaggacgaattcatgcacttgtgaaagcaaacttcttagcttcaccaccacttgtcgttgcttatgcgcttgctgggacaacgaacgtagatatgttaacagaaccaatcggacgtggtaataatggcgaagatgtcttcttaaacgatatttggccaagttcagaagaagtgaaggcgcttgtagaagaaaccgtaacgccagaacttttccgtgagcaatatgcccatgtatttgatgaaaatgaagcttggaatgcgattgaaactacagaagatgctttatacaaatgggatgaaaattcgacgtatattgccaacccgccattctttgataatttagcaaaagaagctggcaaagtagaagctttatctggtcttcgtattattggtaaatttggtgattctgttacaaccgaccacatttcaccagctggtgcaatcggtaaagatacaccagccggaaaattcctgcaagaagaaggcgtagcgattcgtgatttcaactcgtatggctctcgtcgtggtcatcatgatgttatgatgcgcggtacattcgccaatattcgaatcaaaaaccaaatcgctcctggaacagaaggtggttacacaacatactggccaactggggatgtaatgtccatttatgacgcatctagaaaatatatcgaaaacaacactggcttagtgattcttgctggcgatgattacggaatgggatcttcacgtgactgggctgccaaaggaactaatttacttggaattaaaactgtaattgcaaaaagttatgaacggattcatcgttctaaccttgtaatgatgggtgttttaccacttcaattcctaccaggagaagatgcagatacactaggccttactggttcagaaagtttacaagtggaaatcagtgaaggtgtagcgccaagagatattgtcaaagtaacagctgttcgcgaagacggcactagcttcacctttgatgcacttgcacgatttgactcagaagtagaaattgactattaccgtcatggtgggattttaccaatggtccttcgtggcaaattaaaataattaccaaaaaaagaagcgagcaaataagttcgcttctttttttattttcactttgcaaaagggaacgtatgttttatgattggtaataggaggcttgagcgaatgaggtataaaagataatttggtgtaccaggaataatgcagcagtagttggtttcttatttcaaagcggagtatcacccagatgttccgaactggctattatttttatttttagcattgagtatcgcagttgcagttagtcagtggagagagaaacggataatttggagttgtattggtttgtttgtagccgtattaattagtgtgtattatattttaactatataggaggaactcaatttgtccgaagaattacgttgtccatggtcgattaatgacccgtttgaactagcataccatgatggcgagtggtgcgtcccgagtaaggatgatacttatttatttgaaatgttgaatttagaaggggcacaagctggcctgtcatggaaattaattttacataaaagaaaagcctatcaagaagctttttttcattttgatattgataagtgtgctcggttaacagatgaagatttagcgcggatcgtttcagaagcggccattgtgaagaaccgtttgaaagtcaaagcagttcgcaccaatgccctagctacacaaaaagtccaagcagaattcggctcattcgctaattatatttggagttttacaaatggagagcgaattattaatgaatggcagggaatgggagaagtgccagctaagacggaactatccgaaaaaataagtaaagatttgaagaaacgaggctttaagttcgttgggcctgtgattatctattcttatttacaagctattggcatcctggacgatcatttacgttcatgtccattccatacgctaaatagggaggcgatcaaatgatgattcccgcaaaattaaaacaaggtgatgaaattcgcatcattgctccaagccgatctcttggtataatggcagaaaatcaagtcgatttcgctgttaaacgcataaatgagatgggtttcaaagtcacttttggagagcatgtttcagaaatggattgtatgttaagctctagtattcgctcaagagtagctgacattcatgaagcgttcaatgattcgaatgtgaaagcgattttaacggttatcggtggttttaatagcaatcaattactaccatatttagattatgatttaattgctgagaaccctaagattttatgcggattctctgatattacagcgctaggaacggctatttatacccaaaccgaactcgttacttattccggcgcacatttctctaccttttcaatgaaaaaaggcctagactacgtacttgattcatttagcgcttgcttagtagataaagaaccatttgcgctaacggcaagtacttcgtggagtgatgatgaatggtacttggatcaagaaaacagggacttcaagccaaatgaagggctagttgttcttcaagatggagaagcagaaggaaccattatcggcgggaatctctgcacgcttaatttactacaaggaaccgaatatatgcctgatttatctggtgctattttatttctggaagatgattttatgactgttccagaaacgtttgatcgtgatttggagtcacttcttaatcaaccaggtgcagatgaaataaaaggtttggttattggtcgcttccaaacaaaaacggcaatgacaaaagaaaaacttgcttttatcatagaaacgaaaacagctttacaaaaaatcccagttatttcaggcgcggattttggccatacgcaaccacttgctactttcccaattggcggaacagcaagaattgatacaaatgcagtaaataaaattgagattatcaaacattaaaaaaagaggttgtccataacggacaacctcttttttggattaacttaacgcgacatctcgttttttgaaaatgaagaatgtaaagaagaggatgatcgctgtatatacgccaaggccagcaataatttgccaatctgctaaaccgccagcgattttttgaccgccaactgtatcatttaagctaagcaagttgaaaataatccatttcatccagtcgtatttttcgatagcgagtggtagtagttgacgaataattccaccagagaatagtacgccgacaccaacaccaactgctaatgcttgtgaacgaacaacggatgagaagaagaatgcgatagttgcatacacaatcatcagtaagaagtttgttccgagtaacatccaagcatgatcccacgctgtcattgcgcctgatgaaggggagagcggcatgaaaatcgattgcttcggaagaataaacgagaagataaaactagctaataatagcgtgatggaactaatgatgctataaacaatacacataaaatatttagagaaaagaatttgacttctagaataaggtcgtgcgagtaataacttaattgttccgccagaaaactctgttgcaacaataatacttgccacaattactactagcatcgttgcgactgccccagagctaccgagtgatgcaaagaagtcagcacttgaaattcccgctgaattgctagcaggtttttcatctgcatctacataagcttgatagaaatcaatttgtttttgaactgattctttttcatctttcgtttgagctgcttgtttttgagtttttaagtaagcaacggaatctgttagtgatagtgtttcggttttatatgttgggttaccatctttatccgctgaattccagtattcctcctcacttaccggagttcctttatcatcgtaataagctgtaattccagcattacttgcattgccaccttcaacaccgcttgtatcaatcttactaacgaaaaacataagtagtgccaaagttaaaactgctgcaaataagacaatttgcataatccaactagattttctagaaaataatttagtgaattcattttttattaatgctatcatgcttttacacctccgccatttgttaattctaggaatcgttcttcaagggaggcttgaagtggaaccatttccaataaatcgatatttgcttgaataatcgcgcgggcaattaaatggacatcttcgtgagccacttcgattttaaatgaattttctttctcagcaacaagttttactggaagtgtagcaagaacagtttttgctgctacgctatcagtgactttaagttgataaacagccacatgattttcaagtacgtcactcattttttccgtatgagttaagacacctttattaataatagcaaaacgatcggtaatttgttgaatttcgctaagtaaatggctagaaattaaaacagaagtaccgtttgttgctaaatcacgaattaatgctctgaattctgccatcccttgtggatcaagtccattggttggctcatctaaaataagtagggcggggttgtgaagtaaggcttgtgcaacgcctaaacgttgacgcatacctaaggaatatgtttttactttttgattgatggcatctgaaagttttacaagttctacaatttcacgaatatgatcgtctgtaatatttttttgactcatccgtgcaaattgctttaagttagcccatccagacatatacatataaaattccggattttcaataattgctcctacttcagaaattgctgctttaaagtcggtatcaatatttttaccattaatataaactgtaccttctgagcggcgaattaagcctacaatcgagcggataatagttgttttaccggcaccatttggaccaagtaaaccaaatacttctcctttatgtatgtcaaagctgatatcgtggacaatatttttttgtccgatttttttcgtgacatgttctaattttaaaactgtctcagtcatgaactcactcctttttttctctcactactaaaattgtactattttttagttctaattacattcggctagaggacgggaaaaaatcatactttagtagtagactcattttctaagttaaggtgccaatctatgctgtaatgatcgataacttttgcgtattttgcatcccaaaaagttttttgaatagggatttcaacggtccctgttttagaaagtagtacgaatgcatgtacaaaactttcttcagtttcaaaattaactgcaagtgataaacgatttcccgcatctgtttcgccttctagtgtatctgagaagtaaaacaaatctttatcgtctttcgtaagcctagcatgaaggattcgttcgcctaatttttcatctccagagaatccttccatctcgtgaaaaaaacgagtttttgtaatttctgcttgaaacacttttttataaaattctagtgcttcttgggcttccccgttaaaagtgaagtagggcacagttgctcgtatcattaaatcaactccattcttgtttcattatactaattttagtactaaagcgaaagcgcaagccctgggatggacttgcgctttcttctaactttatatattaatggtggacaagttagctagtttttaaacacctttgtaagcttcaaggtaaatttcttttagttcgcttacaagtggttgtttagggttggcagtagtacattggtccatgaatgcgcgatctgcaagtgtatctacaactgcatccaagtcttttttagcaacattttgtcctttaagactcatgtcgataccaacatctttaccaagtttgatgatttcatctacaagtgatttaacgccttcttctgtagttgcagcagggaagccgataatacgagagatacgagcataatcttcatcagcacggaagctttcatatcttgggaataacgcatgttttttaggtttaagtgcgttataacggataacgtgtggcataaggattgcattcgcacgaccgtgaggaatgtggaattcaggtccaattttgtgtgccaagctgtggttaattcctaggaacgcattcgcaaatgccataccagctagggcagaagcattatgcattttttcacgcgcatcaggatcaccagtaagaacagattcacgtaagttttcaaaaacaagttcgattgcacggatagacaatccacgtgtataatcgcttgccattacggatacataagattcaattgcgtgagttagaacgtccataccagtatcagcagtaatgtgtgctggaacagttgttacatattgtgcatcgacaatcgcaacgtctggagttagttcatagtcagcaagagggtatttaatgttgttttctttgtctgtaataaccgcaaatggagttacttcagaacctgtaccacttgttgttggaatcgcaacgaatttcgcttttccaccaagtttaggatatttgaaagtacgtttacggatatctaagaatttttgtttcaagccgaagaatgaagcttctgggtgttcatagaataaccacatacctttggcagcatccattgcggaaccaccaccaagagcgataattgtatctggtttgaagtctttcattagttctgcacctttgtaaactgttacatcagatggatctggttcaacatcagcgaatacttgataagctacgtcgttaccacgttttttcaggtgttcgattactacatcaacgtatttgaattgaaccatacctgggtcagttacgataaatacgcgttcaacgccttccattttttgaaggtattgagtagaatatttttcaaagaaaatttttggtggaagtttgaaccattgcatattatttctccgatccgcgatacgtttaacgttcagcaagttagtcgcacttacattttgtgatacagagtttttaccataagatccacaaccaagagttagggaagggatgaagccgttataaatgtcaccgataccgccttgagcgcttggtgcatttacgatgatacggcaagctttcatacggataccaaatgctttttgaacttctttatcagtagagtgaataactgctgagtgtccaagtccgccgtatactaacatttcttcacaacgatcgaatgcttctgcttggttagcagcttcgataaatgcaagaactgggcttaatttttcgtgagatagtgggtatttgtcgccaacacctttaatttcagctacaagaatttttgtatcttctggaactttgaaaccagcttggtttgcaatccatgcaggggatttaccaactacatctgggttaagtgttcctttttcagggttgattacatagctttctagttttttgaattcagcacctttaacgaagtagcatttgtttgcttccatttctgcttttacttctttagcaacttctttgtccacgataactgcttgttcagaagcacaaatcataccttggtcaaaagatttagaaagaatgatgtcattaacagaacgtttgattttagctgttttgtcaatgtaagctggtacgttacctggtccaacacctagtgcaggtttaccagtagagtatgctgatttaaccattccagcaccaccagttgcaagtacaagtgctactttatcgtggttcattaattgttttgttgcttctagggaaggtttttctacccattgaatacaatgttctggtgctccagctgcaactgctgcatcataaacaacttttgctgcttcagatgaacaacgttgcgcacttggatggaaagcgaagatgattgggttacgcgttttaatcgcgataattgctttgaaaagtgttgttgaagttgggttagttactggtgtaaccccggcaactactccgactggttcagcaatttcgataacaccagtttgagtatcttcgttaataactccgactgttttgttgtttttaatgttgttccaaatatattctgttgcgaagatgtttttaatacatttatcttcgtataatccacgtcctgtttcttctactgctaattttgcaaggggcatatgttggtcaagtccggcaagcgccattgcgtgtacgatattatctacttgttcttggttgtaactttcaaatgctttcaatgctttttgtccattgtctgctaatctgtcaatcactttttgaacttctaatacttcttgggccgcattttctttaattgccattttccagaacctcctaatatttgtgcgggactctaaatgtccatagtagacttttgacgtccctgataatccaaaaaaatttgacttgttgctgtgccatattcttttgttttatttgattacaccgttagtataagccatcaataaaagtttgtccagtgtttcacgtgaaaatattcacaaatagacgaaaatgagcggatagtccttctgggaaagcaatttttagtctataaggcatagtttgtatgagtggttttatcatatagttttaaggggattttcatctctagttgactcgtaaataaaaggtaattaagataatgatttttttttactattaataatgtcctgtattaatagggggatagagggattttctatgatagttctttttacttagttgtttattaactgctattttgatttatgtggttttattttcttgactttccgtttgttcttatgtaagatgaatacaagtaaaaaatgatagctttgatgaagagtaagtagcatgatgaaagtttttagagagctgacggttggtgaaagtcagtagcggacatgatgtgaatggacttctgagctctggtttgaaaaggaatttccttagtaggatgcagcgattaggccttatcgttacacaaggcgcccattcggaatttggatggattaagtgaactgtttttgcagttaatcaaggtggtaccacgggtctctcgtccttgtctagtatatttgctaggcttggagagaggcccttttttaattttataaaacgaaaacatgaaacaagaatagtacttttcatcgattttcaaagagagttagcgtttggtgcgagctaataaatagatgaaataggaatgggccttgtgcgtgataccttgaactgaagtaggggtgaacgggagctcccgttatagagcagctgcaaaaaagcagcactgagatagggggattcccctaaaatgaggtggcaccgcgataactcgtcctctgaaaaagcatgatagtaggctttttcagagggctttttttattttaatgaagaagggatgatttaaatgagaaaaatgaaaagaatggatgcagatacattaaccgcgattttagcctttcaacgtctttccggaacaggcaaaagcttacttgaaggagctgcaaaagatgcagaggcagggagatattctattattgctatcaatcctgtacatgaaattaaagtatatcaacatgaatattatatagacggggcacttcaaatagtgacagaccctttaaaagaaattgaactatttattgaaaaagcaaaggcggaggaagaaagcttgcctttagattcaggggcaattggttatgttggttatgacgttattgcactttatgaaaatttaggtgacattccagtcgaaacgcgggacatgccagatattcgtttttatatatatgaaagttttatcatcatggatcatcaagcggaagaacttattttagtgcaagataattgctactctgggagaagtgaagcagagctggatgaggcacttgaagcgatgtttttagaacttacaacaccaaaaaaagatgaacacaaagcagttcaagttccgaaaatgacttacaaaagtaattatacaaaagaggagtatatgaacttagtcaaaaaagcgaaaacctatattcaagatggcgatttctttcaaatagtactttctcagcggttagaggcagattttacagtggagccgtttgattattaccgaaaattacgattgttaaatccttcgccttatctctttttcattgattttggcgatacggtcttaattggttcttcaccagagagtttaattaaaacgaaagggcggactgttacgacaaatccaattgctggtacaaggcgtcgcggggcaacaaaacaagaagatgaaatgctggcagcggaattattatccgatgaaaaagaacttgcagagcacagaatgttagtggatttaggacgtaatgatattggaaaaattgcagaaacgggttcggttcatgtaccagtatatctaacaatcgaacgttaccgattcttgatgcatttagtttccgttgtcgaaggtacattaaaaccaggattaagtgcgatggatgctcttcggtcgacgctgccggctggtacagttagcggagcaccaaaaataagagccatggagcgaatctatgaatgggaaaatgtaaaacgtggaccatatgctggtgcggtaggttacttaacgaaaaatggtgattctgattttgctctttcgattagaacgatggtactccatgatggaaaagcttatgtgcaagctggtgcgggaattgtttatgattcagaacctgagagtgaatacttggaaacaatacaaaaagcgaaagcccttttggaggtgggagaatgattttattaattgataactatgattcttttacgtataacctagagcagtatttggcagagttcagtgatgtcgtagtaaaacgaaatgatgccgtggatttaatggaatatgcggctttggcagatgggattgttctttcaccagggccaggaaaacctagtgaagccggacttttggaagaagtggttttcaaatttgcgaaagaaaaacctttacttgggatttgtttaggacaccaagcgatcggtgaggtatttggcggagaagtaaaacgagcaaagcacattcgtcatggtaaagtttcgctgatgcagcaaacgagtggagccatttttactaacttgccaaaagaaatacctgtgatgcgctatcactctttaatagtagataaaaatactttaccagattgcttagaagtattagcagtggcgacggatgatgcggaagtaatggcgatgaaactgaaaaattatccggtttatggattgcaatttcatccagaatcaatcggcacgaatgacggaaaacaaatgatggaaaactttattcacatagtagaaagggcgggagaaaatggaaatcttattacaaaaagtatatgaccaaaaaaatctatcaaaagcagaaatgaatatcgttgcaacagaaatttttgaaggacgactttcaaaaacgaaaattgctgcctttctaatggcacttaaagtcaaaggagaaactgcagaagaaatggctggaatagcagaagcgatgcagcaagttgcgattcaagtggatttcccagctggaactgcgatggataattgcggaactggtggagataaatcgaatagttttaatatcagtacaacgtcggcattcgtccttgcagcagcaggaattccagtggcgaaacatgggaatcgaagtatttctagtcgttcaggtagtgcggatgtttgtcaggaattagggattgatattaatatgcgtcctgaagatatgacttatttacttgaaaaagtagggattgcctttttattcgcaccacatgtccaccctaatatgaaatacgtgatggacgttcggaaagaacttgggacgccaaccatttttaacttgattggacctttaacaaacccggttcatctcgaaacacaattaatgggtatttatcgtcgtgatttaatcagacaaactgcggaagttttaggacaacttggacgaaaacgggccgtagttttaaatggggcgggctttatggatgaagcttctctagccggtgaaaatcattacgcattatatgaaagcggggaagttcacttatatacactaaaacctgaagaagtcggtttagctagctacccactagaagcaattaggggcggggatgcaaaagaaaatgcagcaattcttcgtagtgtacttgacggcgaacctggtgcctatttagacactgttttgctaaatgccggatttggtttattcgcaaatggcaaagtaaaaacagtaaaagaaggcgttgatttagcccgcgacctagttagaagtggtctagctaaacaaaaattgcaagatttaattacttatcaaaaagaggtgctagcgaaatgacatttttagaagaaattttagctcaaaaagcagtagaggtagctgaaatgccattagaacaagtagcagaaaaacggaaaacttattcgttttatgattttttaaaagaaaatacggaacaaatgcaacttattgcggaagtaaaacgcgcctcgccttcaaaaggtgaaataaatatggatgtgaacccagtcgctcaagcaaaatcgtatgaggcagctggagcaggtatgatttctgtattaaccgacccgattttctttaaaggatcgattgaagatttacgagaagtagcgaaaaacgtagcaattccagtactgtgtaaagattttattattagtgaaaaacaattaattcgcgctcgaaatgctggagcaacggttgtgttactaataatttcagctcttacagaagatgagctagccttactttttaaacaagcgagtgcccttgatttggaagtattagtagaagttcatgaccgggacgaattagctctcgcgcaaaaaattggagctaaattaattggagtgaataatcggaatttgcacacgtttgaagtagatattgcggtaagcgaaatggttgcgaatgatttttcaacggaggcatgtttcattagtgaatcgggttttaaaacggcagatgatgttaatcgagtgagtaaagaatttaatgcggtacttgttggagaagcgcttatgcgagacaaaactccacaaaaagcagcagaaagtttgaaggtgaaacgatgattgtaaaaatttgtggattgaaaaaaagtgtcgatgtaaaagcagcagttgagaatggtgcggatatgattggtttcgtttttgcgaaaagtaaacgccaagttacgattgaacaagcacaccagttagctaaaaacatcccacctaatattaagaaagttggcgtttttgttaacccgactgaagatgagttgactgctgctattaaaggcgtaccactagacatcgtgcaactccatggacaagaaccgaccgagcaagcagaccgcaccgatgccgaagtaattaaagcttttccagttaaagagggcaaacttcctaacaatataaatgattattcaaatgcctatatcttacttgatgctccggcagaagaatacgagggcggcagcgggaaaacttttgattgggataaagtaaatagtgatttacttataaaaaataaattgattattgctggtggcttaaatgtcgaaaacgtgaaagaagctattaaccgctttgaaccatatgccgttgatatttcttccggcgtagaaacgaatggtgaaaaagatcctgaaaaaattaaaatcttcattaaaacagcaaaaggagttggaaaataatgacatatcaagcacctgatgaaaatggtttttacggaaaatttggtggcagatttgtgcctgaaactttaatgaaagcagtgaaagaattagatgaagcttaccgagcttctaaaacagatgcagcttttcaaaaagaattaaattactatttaaaagaatatgtaggccgggaaacgccgctttattttgcggaacaacttactgcctatgctggcggggctaaaatttatttaaaacgagaagatttaaatcatactggtgcgcataaaatcaataatacgattggtcaagcattacttgcgcggcaaatgggcaaacaaaaagtagtggcagaaactggagcagggcaacatggtgtagctacagcgacagtagcagcactttttaacatggaatgtactattttcatgggagaagaagatgttaaacgtcaatcgcttaatgtatttagaatggagttacttggcgcaaaagttgtcagcgtgaaagctggcagccgtactttgaaagatgccgtaaatgaagcactgcggttctgggtggcgaatgtggaagatacgcattatattatgggatctgttcttgggccccatccgttcccagaaattgttcgtgattaccaaagtgtcattgggacagaagcacgtaaacaacatctagagaaagaaggtaagttacctgaggcgattgtggcttgtgtaggtggtggcagtaatgcgatgggcttattttatccgtttgtggatgattcttctgttcaaatgcacggcgtagaagctgctggtcatggtcttgaaacagagttccatgcagccacgatttctaaaggcgagattggcattttgcacggggcaatgatggatgttttacaagacgaaaatggacaaatccttgaagctttctcgatttccgcgggattagattatcctggtattgggccggaacatagttttttccgtgatttaggtcgcgctgagtatcattctgttacagatgatgaagcagtcgaagcttttcaacttttatgccggacagaagggattattccagcacttgaaagttcgcatgccattagttatgctgtgaaacttgcaagccagatgcgtccggatgaaagtatggttgtatgcctatctggtcgcggggataaagatgttaatcaactaaaagaacgattggaggggcaaactaatgactaaaacattaacaaaaaaattggcgaataaagaccatgcttctgtagtaacttatattatgggcggcgatggtggtttagataatctagaagaacaactattattcctagaaaaatcaggcgtaagcgcgattgaaattgggattcctttttctgatccagttgctgacggccctgttattcaacttgctggtttacgcgcattaaaagaacgagttagtttagaagcaattttaactaaattagccacaagtaaggtgcaaattccactaattattatgagctatattaatccgatttttcatttaggtattccaaaatttatcgaaatggttcaaaaaacacctgtaaaaggacttattattcctgatttaccttatgaacatcgtacgcttattacacccgaactaaaaggaacagatattgcgcttatcccgcttgtttcattaaccagtccgaaagagcgcttagaagaaatagctaaccaagcagaaggttttatttatgccgtaacagtcaacggaacaacgggcgtaagaaatgaatttaatacgcatattgatacccatttagcttatttaaaaagtattagccctgttcctgttcttgcaggttttggagtttcttctatagaacatgtggaaaaatttgcgcgtgtttgtgatggtgtgattattggaagtaaggtcgtacaaatgttgcatgacggggaaacgagggagctaggtacgtttttacaaaatgcagcagaagttcaaatcgaaaactaattactacttacaatttctctttaaatatggtaaagtctggtgtatagaatgttaaagaggagttgtaaggatgtctgttgaagtaaaaccagagcatgcaagaatgctcaataacacgaaaaatgtaacacttgggatagcgattgtatctactatccaagccgtattaagtagcgtttctattgtgggacttattgctctacaacaaagaaaagaagtacttgctaatgcaaatgcaaccgctgtcgttcaaaatacgattatgacgacaacgataatggctgttatttgtatcgcatttacgattatgctatttctttcttataacaaacttagaaaaggcattataattacaccgcttgttttttatttatatggtgcgtttaccattcttggtgtcgttttatcaatgattaatagtggtgtgaactttgtttcgcttattttaccagcagtgctacttgccttgagtgtaacttgtattttaaatcttagaagaatgcgttaaaagtagtaatgtaagaatgatttttacataaacatatataacagacagacttaaaagaaaaaatcaattgaggtaatagaaattatgagttcaaaattaatgcgaggaacggccgtacttactgcgggaactttattatcgaaaattttagggattttatatgttattccattttactggattgctggcagggaacaggcaacgattctttatcaatacggatatgttccctaccaaatcttcttaaatattgcgacagctggagttccattagcagttgctaagtacatttctaaatataattcgctaaatgaatatgctttaagccaaagattatataggtctagtacatatttgatgatatttaccgggattattagttttttaattatgtatatttttgcaccgcttttagctgggatgcaagaggttagtggcggaacgagcattcaagatattacaaccgttattcgtgcagtgagttttgcgttacttattattccagtaatgagcttacttcgcggttatttccaggggtttcattcaatgggaccctctgctgtatcgcaagtaattgaacaagtagcaagaatcgttttcctgcttgcaagtacgtatattgtgcttcatcttattggtggaagtcttgtaacagcaatgagcttagcgacatttgcggcttttgtcggagctttcttcagtttaatttgtttactgtggtattaccgaaaacgtaaacccggtattcagaaaatgattgccggtagtgaaaataaattacaagtgtcgacgttacatttattaaaagaaatctcaatctcagcagtgcctttcattatagtaggaatggcgatgtcactatatcaacaaattgatttattcacctttgcgcgtgttttgacatacgatggcatgcccgggaaggcagcggaagatttactttctattttcaacttttctgttcaaaaaatcattatgattccggggacattggctttggcgttttcgatgacgctcgttccgctcgtggctgcttcatttcataaaggtcggattcgcgaagtgcatcatcatctaacagctgttttccaagtattgctatttttagtcgtgccagcttgtttaggaatagcactcttggccgatccgctctatacgatattttatggttataacgctgatggatccatgttgctaagctttttcgctccatttgcaattttcttctcgctatttagtgtcactgctgcgattctacaagggattgacgagcaacgttatacagtacttagtttacttctcgggttactaacaaaatccgtactacaaatgccgctaattttacttcttggtgcaaaaggtggcgcacttgcgaccggacttggttacattgtttctgtgctgttcaccatttttattattaaaaaatatgctcattattcatttaagtatattattagacgtctggtgttaattcttggaataagttttgtgatgttagttagtgtttggctcatttatcatgggcttgcattattcttaaatccgcatgcacgatttactgcattagtaattgtttttatatcagctggagtgggggcttatatttatgcctttttagctgcaaaagtagggctattaaactatattctaggtgaccggatgtataaaattcgtaaaaaacttcatttgatttaagctttttgtaaagagcaagccgatatttatttgggtttgttctttttttttaaaagagttaatggtaaagtaaacaaggatatataatttaatgtaaaggaagttagacgatgggttcaaaactgctcagaggaacatttattctgacgctagggacattaatctctaaagtgctcggaatattgtatgtgattccgttttatgcgattattggaggagatgaaccagcgcttctgtataatttcggttatgtaccgtatcaattattcttaagcattgcaactgctgggataccgttagctgttgccaaatatatagcgaaatataatgccatggaagaatatgctgttggccgtcgattatttaaaaccggtgtatatttaatgattttttccgggattgtttgtttccttgcgatgtatggacttgctccaacgctcgctcgaatgcagcagttggaaggcggatatagtttagcggatggtattcaagttattcgtgcagttagtttcgcgctacttatcattccagtaatgagcttgcttcgtggctttttccaaggatataattcgatggggccgtctgctgtatctcaagtgttagaacaagttgtccgtattgtgttcttgcttgctgggactttcattgtaatgtatgtacttgacgggaatgtagttacagcaattagtatcgctactttttcagcttttgttggagcttttgcgagtttactattactactttggtacttttataaacgaaaacctggactggaccgaatgcttttagaagatagaggcactgtaaaaatttccattccgacactatataaagatattattctttcggcaattccttttattatagttgggtctgctacttcgctttatcaattaattgaccaattcactttaggaagagtgttagaatatattggaactgctcctgatttggtcaattcttttgtagcaattattaactttgatgtacaaaaattaattatgattccagggacgttggcaattgcgttttcgatggcacttgttccacttgttactggtgcttatgtaaggaaagagtacgcgcaagtgaagcgtcaactcaatgatgttttccaaattttattattcttaacgattccagcttgttttggaattgctatgctagcgagacctttattcacagtgtttttcgcacctagtgataatgggacagcgctattacaattatttgcaccaatcgccattttattttcattgtttagtgtttccgcagctgttcttcaagggattgatgaacaacgattcacagtgctaggcttactgttagggctactagcaaaatcggtattacaaatgccgctcattatgatgtttgaagcgcctgggtcaatcattgcaactggtattggttatgcagtatcttgtctgttcatgttatttattattaaaaaatatgttcgtttctcgtttaaagttattttgcggcgaacggtgcttttcttctttatgacagctttgatgggggttattgtcatcggactgtacatgggacttgctaactttattagtccagatcgtaaaatgtctgcgctagtattgacacttatttgcggaggaacgggtgctgttttctacggttatatggcattcaaacttcacttgtctgataaattatttggcccacgtggtactagattacgtgagaaattaagaattcgctaggaggattttatgaaaaaaacaccatttataattagtggcattgctctccttggatttgttttctttatgataggcgttatgactggggcaaaatggattcacaggtttgaccagtactggaatagtattattcgggtcggaataacggatacaaaaactacactgatttcttatttaactgatattggcggggtagcgaccatttgtattttaaccgttgttgttattattgcgcttgttctaatgaaaaaagtggatacggcaatttggtttggtgggattgtcctagttggcggggcgcttattccatcaatcattaaaaatatcgttcagcgcccaagaccaacctataaattaatcgaacaaggtggatttagttttccaagtggtcatgcgactggttcaactgttttttatggaatgctagcgttctttttaattttatatgttagtcataaatggcttcgttttgcgattagtattcttgcgctagggcttgtattgtttattatgtattcccgcgtttatttaggagtacatttcccaagtgatgttgtagcaggattcttaattggaaatgctgttatttacagcggaattggttgttactttatttggaataaaaaattagttttatgggctaataaatttaataaatcgtaaaaaaatcctctctttagataaagagaggattttttattaagcatgttcgtctgtttcgctaaaaattttcaaataggtcggtaactcttcagcaatttcagtcggcaacacaacatagcgttttttagctaaaatttctccaatatagctatgaagaaaaacagcagctagtgttccggtaagcggcttctctgtttgtgccatcaagccacatatcgttccagcgagagtatcgcccatgccacctgttgccattgcgggagtgccgtacatattttgccatgctgattcacctgaataaacttttgtacgatgcccttttagaacaatcgttgcgtcaatatgaagtgcgacatcagttggcgtttctgcttcaggtgctagtgctttcagtcgttcccattcacctgcatgtggtgtaaaggtaagctttgcggcaggatgaggattttctccttttgcataaatagtaatgccatctccgtcaataataagttgttgatgttctgttgaattttgtaatactaatcgaaaaatttcttcggcataggcatctaatccaagtccaggaccaattaaaatggtatcaaaatgattaatttgttcacttagacttgtgatgttttcatagtcaataaacatacattcaggaattcgtgtttgaagcgcagggcgattaacactatctgaggccaccgttgttaaaccagcaccacttttaacacaagcctctgcagccataatcgcggccccaccaaattgtttatttccagcgacaattaaaacgcgcccgtaatcacctttatgtgtttcatcttcacgttttggaatccacgcgcacattgctttcggtgtaattttcttcacttttgtaaaacctccttatgacactggcttttatctactcaaccgggtaaaataaagaacagataaatcatgtttatcttaaatgataaggaggcttttgtaaaatgaaacctatatatcctgccgtaaaagcagttatcgtaaaagatggtaaatttttagctcttaaaaaaagaggcgtagaaggcgaagtatttgaacttccgggaggccgtatgaactacggtgaaactcacggagaagcgctttttagagaagtttatgaagaaactaaattacaagtccaaccatttatcttatatgacacatgggagttttttcatgaagactatcaaattacaggcgttatttatttagtggaaatgcctgaagaaggggaagtagtgttgtctgatgaacacgaagaatatcgcttcttaccacttgaaaaagaaagtctgaacataatggatgtcgtattttctacgcggatggaacgttgggattttgaagcaattaaaggttttatgagaaaatagtagttccgacttccaagcggcgtgaaaacagtttacaatagagaagataagtttgaaggagggaataataattatgacagaaattaattggcaaaaagaagtggaatcacgtaaagatgatttcttagaagatttaaaagggcttcttcgcattccgagtgttcgcgatgatagtaaaaaaacagaagatgcgccgtttggaccagacgttaaacgcgctctcgactatatgattgaactaggtaaaaaagatggctttaccgctaaagaagttggtaatgttgctggacaccttgaatacggtcaaggagaagaacttgttggcgtattaggacacgttgatgtagtgccagttggtgatggctggactaatggaccatttgaaccaacattacgtgatggtaaattatatgcgcgcggagttgcagatgataaaggcccaacaattgccggttactatgcgttaaaaattattaaagaactaggtttacctctttctcgccgcgttagaatcattgttggttctgatgaagaaagtggtatgagctgtgtagaacgttattttgaaacagaagaacaaccaacactaggtttcgttccagatgcagaattcccaatcattcacgctgaaaaaggtatctcagaactagatgtatcttttaaagacggagaagcaagtggagaagcagcattccgtttacttagtgtagaatcaggcgaacgctataacatggttcctgaccacgcaacagctattattgaagacgtaaaagactttgataaagtagcaagtgaatttaaagcgttcttagcaaatcatccagttgaaggctcattagaagaaaacggcaaaacagttaaaatcaatatcgtcggaaaatccgctcatgcgatggaaccaaataatggcataaatgctggtcttcacttagtagctttcctaggtaaatttaaattaactggcgctgcaaatgattttgtgacatttggtcgcgattacttattcggtgattctcgtgctgtaaaacttggtattagctatgaagacgtagaaagtggcgaattaacaatgaacgtcggtgttattcgttatgatgtagcagaaggtggtaaatacggtcttaatttccgttacccagtgacagctaatatggataaactaaaaaataaaatgcaaacagttgtatatgagtacaacgctcaatatacacattacgatgattccaaaccgcttttcgtaccaaaagatcacccacttattcaaactttacaagaagtttatacaaaacaaacaggtgaagaagctaccttgctagcgattggtgggggaacttatgcacgtcatatggaaacaggagtagcgttcggcgcactgttcccaggccgcgaagatacaatgcaccaaaaagacgaattcagctattttgatgatttattaaaagctactgcaatttacgcagaagcactttacaaattagcgaagtaagggttataattgaaaaaattaactgctgcaaagcttagttttgtggcagtttctttgtttcattaagtttttagatagttccaaaaattaactatgcaaggagagactcgacatgaaagtactagtaaatgaccgtttagtagaaagaaatgatgctacagttgacgtagaagaccgtggataccaatttggtgatggagtatatgaagttgttcgtttatataatggtaaattttttacttataacgagcatatcgatcgtttatacgctagtgcagcaaaaattgacttagttattccttattccaaagaaacattacgagcgttattagacaaattagtagctgaaaataatatcaataccggaaatgtatatttacaagtaacaagaggagttcaaaatcctcgtaatcacgttcttccagatgatttccccttagaaggagtattaactgcagcagctcgtgaagtaccaagaaatgagcgtcaattcatagaaggcggctcagcaattaccgaagaagatgtacgctggttacgttgtgatattaaaagcttaaacttacttggaaatattttagcgaaaaacaaagcacatcaacaaaacgcgcttgaagctattttacatcgcggggagcaagttaccgagtgttctgcttctaacgtatccattattaaagatggggttttatggacacatgctgccgacaacctaattttaaatggtattactcgtcaagttattattgatgtagcgaaaaagaacggtattcctgtaaaagaagccgatttcactttaacagatttacgagaagcagatgaagtgtttatttccagtactacaattgaaatcacaccaattactcacattgatggagtacaagttgctgatggaaaacgtggtccaattaccgctcaacttcataattactttgtagaagaaatcgttcgcgcttgtggcgaattagaatatgcaaaataataaatcctaaccttccttttttaaggaaggtttttttatgtttagcaacctatgtaaaaatttatataacttttttatgcgttgaaacgactcatttggctccgctttcagacgaaaacaactgttttaaagcaattgacaaatttttttgaaggtgtataattcaaaaggctaatagttcgtatgcgaaatatttgtgggcgaacagtacggagggaagttaatggatgagaagttagtaaaagaggttattttctcttttcgtgaagtacaacgaaaaacgcatcacgtgctagcggaagaagctgctaaccgtgaaatcacaacgacacaattgcttgcaatcagagaactacagaaagagtcagatttaacacttggtgaactagcagaacgcatgaaacttggaaaaagtactgtttcgggcattgttgatcgcttagtaaaagccggatttttaaaacgaacaagaaatgaaagcaatcgacgcgcgcttagcttagaattaaccgaaaaaggagcgacgaaagctgcagaaacgtatcatgtattttttaaccgtttagaacctattttagaaattggcgaagaaaggttaaaagaaatgttagaaatgcatcaggagataattactattttagaaagggaaggtgcacgagattgaatatgaaagcagcaagtacatcagtgaagcgtaatggtattttaattgttatgcttatgggcgcctttgttacgattctcaaccaaacgttgatgaatgtcgcgctaccaagtattatgaaagattttgggattactgccagtcaaggacaatggttgtctactggttttatgttagtaaatggtgtcatgatcccgatgacagccttcttaattgaaaggtttacgactcgccagctttatttatttgcgatgattacttttgcaattggtacagcgattggcggatttgcaacagattatacaatgcttattgctggtcgtatggtacaagcaattggcgctgggatagttatgccacttctaaccgttgtcgtattaaacttattcccgatggaacgaagaggacgggcgatgggcttaattggtctagctatgaactttgccccagcaattggtccgacactctcaggttggattgttcagcaatatgattggcgcaatttattctttattattattccatttgcaatacttgatattgtagtagcaatcttcttacttaaaaatgtcggtaaaagaactttcccgaaactcgatatactcggagttattatgtcgactgttgggttcggtagtttattacttggatttagtaacgccggagaccacgactggttaacgtggaaagtagctggatttattattcttggtttagtagtattaggtatctttatccgttatcaatcaagcaacaaagcgccacttcttaattttaaagtgtttaaatatccaacatttgcacttacaacagcaattagtttcttcgttgtgatggggctttttggcggtatgttgttactaccgattttcttacaaactgttcgaggtttttcaccgcttgaatctggtttagtccttttacctggtgcgcttgttacagctatactatcgccggtgactggggttatgtttgaccggtttggggctaaatatttatcgctagtaggcttaattattatggcaggttcaaccttcatgtttacaaatctagatgaatcaaccacgttaacttttattattatcgttcaaactattcgttctgcgggtatggcgatggtaatgatgccacttcaaacagctgcactcaattcgctaccactaaaattagcttctcacggttcagcgatgtttaatacgatgagacaagtagctggctcgattggtacagctgcacttattacggtaatgtcaaaaagtgccgcgagttttgcagataaacttggtccagctgatgtaattggaaaaacgaaaacagaagttgctaaccatgtgcttattcacggaattgaaacagcctttttagtcgcaggaattctttctgtagtagcttgtattttagcattatttattcaaaaaaatagaagcgcaatggatccaatcgtcactaaaacagaagaaataaaaaattaatttaaaagcgcattccatttaatgagaatgcgctttttttatgcaaaatagtccgttatataaaaaaatacgcggaacgaacatatgttgacttgacgagagctcttaagagaagtaaaatcatgaatagttacctatttgttcggaagttaaaaacaggggataatgaagttgcaaagagctaataaaaggtgtgcatgtaaatgaaagataatttttttgggagagaatatgacatagcgccggctggaggggaaactggccaagcatttgttgcaacacatgaagacgaaaaattctttttaaaaagaaattcttcgccttttttagcagcgctttcggtagagaacattgttccaaaactcgtctggacaagaagagtagaaaacggagatgttatcactgcgcaaaaatgggtgaattgccatattttaactcgtgaggaaatggttggtcctagagtggcgaaactcttagcgaaaattcaccattcggaaaacttacgccatatgctcgaaaaaatcgaaaactgttatttttctgcccatcaattactagctcgtctaaaagcagaaatgaaagcaaaaaatgaagctaataatgtaatgcagacagcaatcgagtatttagagcgaaatattacagctgtcgagaaagcagattacgtcgtttgtcacggggatgtaaaccataataattggataatatcagaagaaaatgaattattccttgtagattgggacggcgcaatgcttgctgatgcggcaaatgatttaggaatgatattataccaatatatcccacgggaaggctgggatgaatggctttctaattatggaacaacactaactagcgaattacatcgtaaattaaaatggtatacactttgccaaaccgtcatgcaacttacgaccaaccaatcagaagaagcgtacgaacgagcaaaacaaatttttcaaaatgcaatagaagatgatgaggtgtaaagaaagatgcgtgtaaaacataaaccatgggcaaaagatcgattggaagaatttccagcaatttacattaaaaacccagaagattttaaggggcgctggcaagaagtatttggaaataataatcctattcatatcgaaatcggttccggtaaaggccagttcattagtggtatggcaaaagcgaatccggaaattaattatatcggcattgaaatgattgaaagtgtcctagtttctgcgcttgataaagcgattgaagcagaagtacctaatttgcgccttgttgcaagagatgccaaattactggaagaatcttttgaaaaaggagaaatagcacaaatttatttgaatttctcggatccgtggccgaaaaaacgccacacaaaacgtagattaacgaatccaaccttcttaactatttatgagcgactattaccaaaagcaggggagattcatttcaaaacggataaccgcagcttgtttgaatattcattagtagctttttcagaatataatatgttactaacttttgtatcacttgatttgcataatagcgattacgaagggaatataaaaactgaatacgaagaaaaattttcagctaaaggattcccaatctatcgtcttgaagcaaaatttgatagagattgactaggataaaccaggtgcacttgctgcatctggtttttatttttaattggaggcgttaaaaatggattccattcaaattggagaaataaaaatttattggttgcgcggaggctatactcattttgacggcggggcaatgtttggggtagttccaaaacctttatgggagaaaaaatatccagcaaatgaaaaaaatcaattagctaatgtaaccgatccgatgttttttcagtatttagggaaaaattatctaattgatagcgggctagggaacgggcgactaacagaaaaacaaaagcgtaattacggggtaaccgaagagtcttttgtattagaagatttagcaaaactaaatattgcccctgaggatatagactactgtttaatgactcatttacattttgaccatgtgttaggtttgactggttgttcagaagagggttattattctatttttccaaatgcggaaatctggacttctgaaattgaatgggacgaaatgcaacacccgaatattcgttcaaaagcaacttattggcaagaaaactggcaagcaataaaagggcaagtccacacatttacgaaagaaaaacgatttaatgatgcgattaaaatgactcatactggaggacatagtgctggacattctgccgtttggtttgagtccggtggagaagtagcgattcatatggcagatatttttccgacattcgctcaccaaaatgttttatgggtaacggcatatgatgattatcctatgacatccatcgcggcaaaacaagatattttcaagcgaacttttgggaaaaattattggtttttatcgtaccatgatgctagattccgagcagttaaaatcggcggaaatggagaaattgacgctgaactaaaaatagaaaatcgaaattaagaagtgggattccgcttctttttttgagggtatttttattttgtgttattatataacctataaagcattatttaaagccaaaacaacaacctgggtagggggttcctatctaatatactataagggggtatatatgaaaaacgaacaaaagaaagcactagtaacaagatttgcgaagattgaaggtcacgtacgttcaatcaaaaatatgacagaggaagaacgcgatttagaaacaattatgcaacaaatagcagctgtgaaaaaagcaatggatgcagctgcgaaagtgatttatacagaacaaatgaaagaactgattgagcaaggcgtggtggacgaagctgttattaaaaagaaaattgatagttttattcgttaaaaaaacgactccccaagtgggtagtcgttttaatttttaggctaaatacacatcaatgattgttcctgtgttagcgtctgcgataaattcgaattgttttttctcgccctcacgaatgcaagtgataccaccgtggtatacgaatgtatcaatggcgaattttttatagtgttgcttttttagttgaatccaagaaccttcaataggtccttcttgtttgaacgcattttttacattttctaagatgacgtcccctgaaattgttttatcgctaagtaaataatgataaacaaggtgtccagctgctgctcctgctccaacgccggcaatgaaagctttccagttcatcgcttttcctccctagtgtttgctattctttttaaaagacgtcttacgaacatctcttttaaccattatactacaaatttttgattataaaaggatttttgaacgcgctttcgataaaatggagaagtatggcgagcggaaacatcttttatttgctataataaaatagatttcacacggaaagagatgattattaatggaaaaagaaacgttagcaatgtttaaagaattaacggaacttcaaggtacttcgggtgatgaacatagaattcgagcatttatgcgaaaagaacttgaaccggtttccgatgaaattatccaagatggcttaggtggcatttttggcgtgcgacacggagcaactgatggtccgcgcgtattagttgcagcccatatggatgaagttggctttatggtaacgcaaattacagacaatggtttgattcgtttccaaacaattggtggttggaatccgcaagttttacaagcgcaacgtgtgcaaattatggcgccaaatggtcctgtaattggcgttgtagcctctgttcctccgcatttactatcggaagcggaacgtagcaaaccaactgacccgaaaaacttacttattgatattggtgcagatgataaagcggacgctgaaaaaatcggtatcaaaccagggcaatttatcgtccctgtcgctgaattcactccacttgcaaatccaaagaaaattttagctaaagcgtgggataaccgttatggtgtcggtcttgcaattgagcttatgaaagaattaaaaggggaatctttaccaaatacgctttttgctggtgcgaatgtgcaagaagaagtcggtcttcgtggtgcgggtgtaagtgcgaatatgattcaaccagatttatttttcgcgttagatgctagtcctgccaatgatacgactgggaataaatcgcaattcggtcaaattggccaaggtttcttactgcgtatttttgaccggacgatgattatgcaccgtggtatgcgtgaatttttacttgatactgcggaatcaaataaaattccatatcaatattttgtttcacctggtggaacagatgctggaaaagttcacacgtcacttagtggtattccgagtgcagtaattggtgttccggctagatatattcactcatctaactcgattttacacgtagacgactatgcagcggcgaaagaaatgattacaacccttatccgcggtctcgataaaacgacttttgaaaccattaaaaataatgcgtaaaataatgaaaaaaccagtattcttggttggatttctacttttagcagcaagtctagtattcttagtaggttacgctacagggataccttaccttcgcgatgctgaaatcggctggatcattaccactctaatagcgggagtgatgacgttaatcgttggttattttaatctttatatagaaaagaaaaaaacgcgatctaaagtacggtgaaaagtttggctcttataacggagccggacttttttcatgagcgttattctggacgaaagttagctaaggcgttaggatttaactagtatgaaagaagaaggagcgaacaaaaaatgaaaaacttagaatctgtagaacaattcaatgagataaaagcggaaggtaaatctgtttttatgtttagcgctgattggtgcggcgattgtaaatatattgaacctgtaatgccggaaattgaagctgaaaatgaggatttcactttttatcatgtagatcgagatgaatttattgatttatgtgctgatttagcgatttttggaatccctagtttccttgcttttgaagatggtgaagaagtagggcgttttgttagtaaagatagaaaaacaaaagaagaaattaatgattttctagctgcaatataaaaagtgactgctttttatggaaggggaggcacctatggcaaaaatgacgacattaaaaatgaaagaacgactagagaaggaactgaataaacctaatcggcagtttgcttacgaacgagatagtgacacactttcggttacccaaaatggcaaaaaagtaactttggctatcccacaaatcatcgcaaattatgaaaacgatggtgaagctgcgattgaaaagattatttactatgtcgaagaaggttttctggctgcatccggaaacattgaactcaaaaacaatacagcgaatatttatcccgttgttagagcgacttcttttcctgataccaccaaagcgggagaagtgcttttaacagatgaacataccgctgaaacgaaaattttctatgcgtttgatttaggaaaatcctaccgtttcatcgaaaaaaacatgctggaaaaagaagggctttcccatgaagaagtcagaaaagcagccttcgataatctgggaaaactagaaattccgctaaaaaaagactcggttaatgggaatgatttttatttcgtgcgtacaaatgacggctatgatgcgagtcgtttactaaatgttagttttcttcagcaaatgcgcgaaaagctaactggggaaatggtgctcgctgtgccgcatcaagatgttttaattattggcgctatcaaagataataccggttatgacgttctggcgcatatgacgatggactttttcgcagatggacttgtgccaataacctctttgccatttgtctataataatggtaaacttgaaccgatatttataatggcaaaaaacagattaaaggagtagaagacgtgatagtaaacgcattttataatgaaaaaggggtaggggacactctactaattgaaacaggcgaagtaacatttgaaaatcgcgagtgggagcgccgtggggatgtcgcacgaatttttgaccgcgaaacaaagcaagttgcaggtttcaatatttttaatagctccaaatactttgacattactgcaaatggcaaagtggatttaactgaagaacttgttgcgttaatgaatcaagttatcgaaaaagcgggatttgaacctgaaatcgtagctgatttaaccccgaaatttgtagttgggtacgtggagtcgaaagaaaaacacccgaatgcggataaattaaatgtatgccagattaatgtgggtggggaagtgttgcaaattgtttgtggcgccccaaatatcgatgctggacaaaaagtagtggttgcgaaaatcggcgcagtaatgcctagtggtttaatcattaaaccgtctaatttacgaggcgaagattctttcggcatggtatgtgccgcgcgtgaattggcaattcctaatgcgccaactgaaaaaggtatccttgttttagaagattccgctacaccgggtgaagaatttccggtaaatttttaaataattgatttttttaagcgcctgatgctatatcgggcgcttttttgcttgctaaatttgctactttgtgaaaatgattaaaatgtagaacaatataactttaattgtatacaatatatgcataaatcgtacaaaataaagataattttcaaggtataataaaaacttatatcgggtttaaacctagttgtatcaaggtattataacgaatacggctcgaaaaatagcgaattcacaattttgtcatagattattttgattttgtctgttaaaatcaaacaagaaaattaaatttagggtgataatgaatgggatggtttaaagattttttctttggcgatatggacgaagaaatagatacatatgaaaatacacctactaaaaaagtagaaaagaaagtaacgtatgctcctgaagtagagccgaaatcaaaagttacggcaattaaaacaaaagaacgaaatacaagaactgtacgacctacaccaaaaagtgtagtgccaaagcaaaaacacctgcaaccagtgaaacggcaagtgaaaacacaaatggtatatcaatatccaaaaggtgaattccgctttccgctaatacctgataagccagtcagccaaccaattcaaacacaaaaacaaacacaaaaacaaccaactagagctatgcatcaaacgagcgacaaacctgttgtaaaagaagaaacaagaaaacgtccttttgctgcgacagatgttccgtctccggtttatgcatttaataaaagaccgagtaaatttgagtttgcagtgtctgaaccagacgaaattgcagaaattcaagaagatttaactattcctccagtggatttaccagaattagcagaagcagaaacaattgcttttgatacagaaattgaaaaacaaatagaagacacttacccagaagaagttggaattgaggaagtagtagaagaaccagttttagctagtaatgaagctactccagttgaaccagctccaaaacgcgtgacccttattcaagaagaaacgacgcaagtacctaaacaaaagaaacaagtcgaagcaagtagacaagaacaaatgttgaaaagcagaattccatttaacgttatgatggtaaaaaaagataaacaagcacttcaaaaagaaccagcagctgaaatcgttcaagagaaagaagtaattactgaaaatattcaacctgttgctataacagaagaaagacaagtagcaccagaatatccaagcaattatcaatttccgtcgttcgggttgctacatccgcccgtatcgaaacgagaagacgattcatggttacaaatgcaacaagaaatgctagatgaaacattagaaaatttcaatgttcatgcgagcgttgttaatagaacacaaggtcccgctgtaactagatttgaagtccaaccagaaaaaggggtcaaagtaagtaaaatcactaatttaacagacgatattaagctaaacttagctgcaaaagatattcgaatagaagctccaattccagggaaaagcacagttggtatcgagattccaaaccaaacaagtcgtccagtgatgctttctgagttaatgaacacagaagcgtttcaatcatctaagtcgccgttaactgccgcacttggtcttgatatttctggaacaccgattattacagacctgcaaaaaatgcctcatggcttaattgctggtgctacaggctccggtaaaagtgtttgtatcaactcattactcgtaagtttgctctataaagcgactcccgaccaattgaaattgcttttaattgatccaaaaatggttgaactcgctccatataatcgtattccgcatctcgtcagtccggtaattacagatgcaaaagcagcaacagttgcactcaaatgggctgtagaagaaatggaacgtcgctatcaactctttagtcataccggcgttagaaatatggaaaaatataatgaatatgcaagtcatcctgatcataccggcgaaaaactaccatatattttaatagttattgatgaattagctgatttaatgatggttgcgccgaatgatgtagaagaatctattagtcgtattgcacaaaaagcgcgggcatgtggtatccatatgattgtagcgacgcagagaccatctgtagacgtaattaccggtcttattaaagctaacattccgacacgcgtttctttctctgtgtcttcacaaatcgattctagaaccatccttgatgcaagcggtgctgaaaaacttcttggaaaaggggacatgcttttcttaccaagtggtgcaagcaaaccagtgcgtctccaagggacatttgttagtgatgaagaaatcgatgctgtcgtagctcatgttcgtagccaaggggaggcagattacatctttgaagaacaagagttacttgtaaaagaatcggttaaagaaaacactgatgaattatttgaagaggcatgtgactttgttttaagccaaaatgccgcatctacctctttactgcaaagacattttaggattggttacaaccgagcggctagattaatggaatctcttgagaatcatcaaatagtttcaggaattaatggttctaagccacgagatgttatcatcacgaaggaccaattggctaaactcagaaacaaagaaacttaattttatagtactaaaataacacgatacttaattagttttacaaatcacctgtattttcatgagtaatttcgcttatatttgctgaaagatttttctaattacatggaaagtgatataataagctggtgaattattgactcaactatgaaatcaagcataaaacacaattggaacgtaagatgatgtctagaaaacggagactttatactgttttcaaagttaagacttggtgcttaacagttaacatgttttttttaggcaccctcttcaagataaattaatgggggttcaaataatgactatctatcattttgttggaataaaagggtcgggaatgagtgcacttgctcagatcctgcacgataaaggttttcaagtgcaaggcagcgatgtagacaaatattttttcacgcagaaagcattggaagaaaaacaaattcaattatgacgttttcagcggataatataaaagaaggcctaacaattattgctggtaatgcatttccagatacacatgaagaaattgagcgtgctaatgagcttaatcttcccgtgattcgatatcataaatttttaggtcaattaatagatggctatacaagtattgcaataactggttctcatggtaaaacatcgacaactggtcttctttctcatgtggtcggtgccattcgtcccacttcatatttgattggtgatggaactggtagtggcacaaaagatgctaaatattttgcgttagaagcttgtgagtatcaacgccatttccttgcgtacaaaccaacttatgcaattatgaccaacattgactgggatcacccagattatttcaagagcgtagatgatgtatttaatgcatttgaaacgcttggtaaacaagtgaaaaaagcagtttttgccttaggagacgatgttgaactacgcaaattatcgttagacgttccgattatttactttggctttggttcagaaaacgaatttcaagctaaaaatgttaaaaaagaaactactggaactaaattcgacgtctatcatcgcgacgagtttttagcttcatttgaaattcctgcttacggagatcataatgttttaaatgccttaagtgttattgcgctttgtgactatgagggattaccagtagacgaagtgaaaaaagaattaaaaacttttgaaggcgtaaaaagaagatttagcattactgaaaaaggaaatcaagttttagtagatgactatgcgcaccatccttcagaaattcgtgcgactgttaatgctgctagacaaaaatatccaaataaaaaaatcgttgctgtatttcagccgcatacatttacaagaacacgcaccttcttacaaggttttgcggatagcttgaatttagcggatgaagtatatctttgtgacattttcggttctgcgcgtgaaaaaacgggtaatttaactattgctgatttagcgcataaaaccaaaggaaatcatattattaaagaagagcacacagaagaattattacaatatccagaagcagttattttgtttatgggagcaggggatgtccaaaaattccaagctgcctatgaaaaagttctagataacgaaatcgtggctaatgaagttctaaagaaaagtgcgattaattaactttcagtaaagcgtgtcatttatttggcatgctttttgcttgtttataattactataaataaagctttacacgatttgataggtgtattaaaatataccatgtgatacaaaatacaactacatagattaatggagggataaaagtggcagaacgtttagtaggcacacaagctccaagatttgaaatggaagctgttatgccaaatcagactttcggaaaagtaagtctagagaaaaatatagaagacgataaatggacagttctctttttctatccaatggactttacctttgtttgtccgactgaaattgtagcgatttccgctcggtcagatgaatttgatgcattaaatgcgcggataattggtgcttcaacagatacgatccattcccatcttgcatggacgaatacaccaatcaaagaaggcggaattggaaaattaacctatcctcttgctgcggatactaatcatcaagtagcaagtgattacggggtactaattgaagaagaaggcgtggcactacgcgggcttttcattattaatccaaaaggtgaaattcaatacgaagtggttcatcataacaatattggtcgtgaagttgacgaagtgttaagagtacttcaagctttgcaaactggtggactttgcccgattaactggcaaccaggcgaaaaaacaattgtttaaactataaaagcgcttaggagcatatcctaagcgcttttcttatactaagttttctggattaagaggagctaattctggaagaacgaaaatgccatctttacgaataagcacatcatcaaagtaaatttcgccgccaccataatcagcgcgttgaatatttactaaatcccagtgaatggctgattgattgccattaaatgcttcatcgtagcactggccaggagtgaaatggaaacttccttcaattttctcatcaaaaagaatatcttgcatcggttcgtggataaacggattgacaccgatagcaaattccccaacaaaacgagcaccttcatcagtatctaaaactttattaatgcgatctgtatcattggcagttgctttaataatttttccgtctttaaaagtgaaagagacattttcaaatgtgaagccttggtatggtgaaggggtgttatacgtaagtgttccattgatagaatcacgaactggagcagtaaatacttcgccatctggaatgttcatttcgcccgcgcatttaattgccggaatatctttaatactaaatgttaaatctgttcctggtccaactaagtgcactttatctgttttattcataagttctactaaaccatccattgcagtgctcattttaccgtaatctaaattacatacgtcaaaatagaaatcttcaaaaccaaccgtgctcatttttgcaagttgtgccatggaggagcttgggtaacggagcacgacccatttagtttgttttacacgaatgtcagaatgcattttaccaacagtctcaccgtgaatttttaatttatctgcgggtacatcagatgtttcgttgatattatcaccagcacgtaaacctatgtaagcatccatttctttcataacattaccttcgaactcggcaattttttcatattgagcactatcagcaccgagcatcatcgcacggtcgatttgtggttcttttaaagaaacgaacgggaatcctccagctttatatgcttcttctactaaagccattactagttctttttgcacaccgaagttttcgattaatactttttccccagcgccaagtttgacggaatagttgattaaattatgtgctaatttttcgattcttgcatctttcatattgtaccctccctaaaatttaacaaaataagcctaaaaaacaagcctgtttctattttactccaaattacgctaaaagcaaccttctataacaaattagcgggtttctttcatattagtttatttttcagcagttacttgctaaaatgaagctaataccttttcttttttacattttgtacatagattcattagagaagaaagttttagaggggaatactcagggtatagaaaaaagaatatggaggtgtggatagatgatagtaattttgtatattgcagcactcattgccgcaattgcgcttttagttattgccatctatttgggaaaaacgttaaaatcaacttcccaaacaatggatgaggtagctaaatcgttagaaaaaataacagtagaagtacaagggattacaggacaatcacaaaaattgcttgataagaccaatacacttctagaagatgtaaatggcaaagttgcgaaagttgatccagtttttgatgcagttggtgatattgggacttctttactaggattaagtcaatctgttcgcgaactagcaacactcgcaactaacaaagtagaacaaaatgaagcaaaaatttctcaagctgtctcaattagcaattcaattctttcttttagagaaaagatgaaagcgaataaagcagcgaaagaagccgcaaaagaagctcgagagcaatctaatttctaatataatttggagggatttacaatggcagaaaaagatggtattaatacaaaagattttctaatcggtggtttaattggtgcaatcgttggttcagccgcagcacttctatttgcacctaaatcaggtaaagaactacgcgaagatttaaatacacaggtagatacaattaaagaaaaaggcaaccaatggaaagacgttgcttatgaaaaaggtatcgaaatcagtggtgtagcaaaaggaacaaaagataaattagtagattccgctggcgggtttgttgatgttgttaaagacaaatcaggcaaattagctgatacagtttctaaacaaagtaaagctgtgaaagaagttgtttcacaaaataaagaagaaaaccaagaagctgctaaaaaagcggcagaaacagtaaaaaatgaagcgaaagatgctgcaagcgatgtagaaaaagcagcagataaagcaaaaaaagaagcaaaaaaatcattagatgatggcaaagatgaagcgaaaaaaattgcttctgatgtgaaaaaagaagtaaaataagattaagttaaaaaacagccttgcgaggctgttttttttatacaaaaaaagcaatatccgcttgtaatttattttaaaacgtgttaacattagttttacattattcactttaatgcttaaaagcgattaagtataaaagtggattcgtgacaaattatctgttttcctctataatgagaaataatcttggagcagatttttagaagggtggaagtaaaatggtcaatacaaatttagaggaacttagaacagaggtggatcaattaaatattgatttgcttgaattaatcagcaaacgtgccaatttggtacaagaaatcggtaaaatcaaaggaacacaaggttctctacgtttcgatccattacgtgaaagagagatgcttaatacgattcttgcagcaaataaaggaccttttgaggatagcacggttcaaaaattatttaaagaaatttttaaagcgggactagaacttcaagaagaggatcattcaaaagcattacttgtttctagaaaaaataaaaaagaagatacgattgttactgttaaaggtttaccaatcggaaacggcgaacccgtattcgtttttgggccttgttccgtagaatcttacgaacaagtggctgcagttgctgagtctattaaagcaaaaggtttaaaacttattcgcggtggagcatttaaaccacgtactagcccatatgacttccaaggattaggcttagaaggcttaaaaattcttaaacgtgtatcagatgagtatggtttagctgttattagtgaaatcgtaactccagctgatattgaagttgcacttgattatgtagatgttattcaaatcggtgcaagaaacatgcaaaactttgaattacttaaagcagcaggtcgtgttgataaaccgattttacttaaacgtggcttatctgcaacgattgaagaatttatcggtgctgctgaatatattatgtcacaaggtaacggtaaaattattttatgtgaacgcggtattcgcacatatgaaaaagcaacaagaaatacacttgatatttctgccgtgccaatcttgaaaaaagaaacgcatttaccagtaatggtcgatgtaacacattctactggccgaaaagatttattacttccatgtgctaaagctgcccttgctattgaagctgacggcgtaatggctgaggttcatccggatccagctgttgctttatctgactctgcgcaacaaatggatattcctgaatttgaagagttctggaatgcaattttagctagtaacctagttcctcacaaaatcaaataatctcgaaaagccctggtacgccagggttttttattttggtcaaaactaataatgcataattggtatttaatactaatattcaatgccgtttcggtatgaaaataaatgaaaataaagagtaaaaacaattgcatatcgaaaaaagttatcgtattattaagggaaggcaagtttgtttccgtttacaatggtatatagagccattaaaataatgaatatggagagtgaatagggatgaatgtaacaatttatgatgttgctcgtgaagcgaatgtttctatggcgacggtatctcgggtagttaacggcaatccgaatgttaaaccagtaacaagaaagaaagtattggatgttattaatcaattaggttatcgtcctaatgcagtagctagaggtcttgcaagtaaacgtacaacgactgtcggtgtaattattcctgatatttctaacgttttttatgcagagcttgcgcgcggaattgaagatattgctacaatgtacaaatacaatattatccttagtaattcggacgaaaatgaggataaagaacttcaagtgctaaatacactgcttggtaaacaagtagatggtattatttatatgggtgaacgaatttctgaacaattacaagaagaatttgaccgttctcctgcaccagtagttttagctggagcggtagatatggaaaacaaattagcttctgttaatatcgattacaaagaagcgacaaaagaagctgtgaaacgttttgtagataatggacataagcaaatcgcttttgttagtggttccttaaatgagcctgtaaaccgtgaaatgaaattggctggttataaagaagcgctagaagaagctggtattacttaccaagaagactacattattgaagcaaaatacaattacaatgctggtgtaaaagtttgggaagaattaagtgcattatctaagaaaccaaatgctgttgttgtcgcggatgacgaactagcaatcggaattttaaatgcggcattagatgctggtattaaagttcctgaagaattagaagtcatgacaagtaacaatacaaaattaacattaatgtcacgtccacaactttctacaatcgtacaacctttatacgacattggtgcagtagcaatgcgtttattaacaaaattaatgacgaatgaagaagtagacgaaaaaacagttattctaccacatagtgaaaaactacgtgggactacaaaagaaaaaaaataagttgacagcatttttagcggtatgttataaatgtatgtatacttttcataacgaaaatgactatgaacggacgaagtagttgcttattcttattcctagagagctagtggttggtggaaactagtagagataagtagacgaattacatcccggagtcacgctgcacaggataatggtgcggccggtgttgagccgttattttttgaagtaggattttttcctaaaagtagggtggtaccacgttaattaatacgtcccttcgctaaactgtttagcggaggggcgttttttatgtccaaaaataaaaggagaatgatgaaaatgaatattattgatgaattagagtggcgcggagctatttaccagcaaacagatgaagaaggattacgcaaatgggtagaagaaaaacagatttctttgtactgcgggattgatccatctggagattcgatgcatatcggtcatttaattccatttatgattttacgccgtttccaaaacgctgggcaccgtccgattattttagttggtggagcgacaggaacaattggtgacccaagtggtaaaaaagaagagcgcaagttgcagtcgatggaacaaattagcaaaaacgtcgaaagcttacgcgtccaacttggaaagatttttgattttgagggtgattcggctgctagcatggtaaacaactatgactggacgaaagatgtgagtattcttgatttcttacgtgattacggaaaagaattcaatgtaaacacgatgctttcaaaagatattgtcgctagccgtttggaagtagggatttcgtttacagaatttgcttaccaaattttacaagcgatggactttaatcacttatatgaatttaatgattgtcgtctgcaaattggtggtagtgaccagtggggaaatattactgctggactagacttaattcgtaaaaaacaaggtgagaatgccaaagctttcggtctaacaattccacttttaacaaaagctgatggaactaaatttgggaaatcagaaggtggcgcgatttggttaaatccggaaaaaacaacgccatacgaattttaccaattttggattaatacggatgatcgcgatgtagtgaaatacttgaagtactttacattcttgactgaagctgaaattgatgagttagcgaaacaagtggaagaagaaccacatttacgagctgcacaaaaaacgttagctgctgaaatgactaaatttgtgcatagtgaagaagcgttagaacaagcgcttaaaatttcaaaagcattattcagtggggatgtaacagctctaactgcggatgaaattgaacaaggtttcaaagatgtgccaacatttgtagcggaggatgcagaagtaaacctagtagattggttagtaacacttgggattgaaccgtcaaaacgccaggctcgtgaagatgtaactaacggagcaatttacattaacggtgaacgtcagcaaaacgtggaaaaagtaattgatgcaagtgaccggattgaaaataaatttacaattgtgagacgcgggaagaaaaaatacttcttagtttcttataaataagaagaaaagcacttgtttttaaaggcgagtgcttttttgtgcataaaaaaaccttacaaccacaaccgaagtcatgaattgtaaggtttttagttctaattaacggctgtagaattctacgataaatgcttcgttgatttcagcagcgagttcagaacgttctggtagacggttaagagaaccagttagagtttctgcatcgaaagttacgtattcaggcacgaagctcgaaacttctaagctttcagcgattgcagagtttttagcagatttttcacgaacagagatcacttgaccaacagaaacttggtaagaagggatatctacgcgtttgccatctacagtgatgtggccatggtttactagttgacgagctgcacgacgagtgcgagcaagaccaagacggtaaacgatgttatcaaggcgttgttctagtaagatcatgaagttctcaccgtgtttaccttgtaatttaccagctttgttgaacgtgtttttgaattgacgttcagttaatccatacatatgacgcaatttttgcttttcagcttgttgcaaaccatattctgagatttttttacgttgagttgggccgtgttgacctggagcatacggacgacgctctaattctttacctgttccagaaagtgaaattcctaaacgacgggaaactttccagcttggacctgtataacgagccataagagactcctccttttatttgtttttggtataaaacaaacgtgacgtaaaaccaaatcagggcagtttaccttcatataccatcaccatagcagccgccggttacgcgatataccacagaattacatctgggggtaaacaacacactcattcattttactcaagctgcattttacacatcttccagtatagtatagttactagttctttgtcaatttatttcttgagtaatcgcatcacggattttttctagccacaactggtccacttcatcaaaacgattaaagaggggactatcaatatcaagcacaccaaacaactgattattttttacaatgggtagaacgatttctgaattagaggcagcatcacaggcgatatgtccagggaaatcatgcacattttctactatatatgttttttggtcagaggcagcagaaccgcagacacctttacctagtggaatgcgaatgcacgcaggtagaccttgaaaggggccgagtactaattgatttgtttctttttcaagtaaataaaacccaacccaattaatatcggaaagtgcttgatttaatatagaagaaacattacttaaatttgcaatgagatttggttcaccagcaatcattgcttgtacttgttttaaagcaagagcgtaattttcttcttttgtaccagtcattttttggatttcaatcatttttatccccacatttcttttcaaataatgtttatagtatagcatgaaataaaatggattttcggaaatttgttttgagataaagttgctttgaaaattttttcgctaaacgcaagtaattctgcgcaaatcgtggtaaaataaaagatgtgtataatgaactgaaaataaggaattaaagactacatatggaaagatgtacataatggaaaaagtgtatggacagcacgagtgtggctgtttttctttcacaagttaacgttgatgggaggattttggatgtactacatgttaatcggctttattatcgtagtaattgcagtcattagtgcaggctacattttaaaaagaaaacattaccaaagaataaacgaattagaagagacgaaaatcaaactcagagaacggccggttattgatgaactttcaaaagtaaaaaaattaaagctaacaggtcaaacagaagcgctttttgaatcatggcgctcctcttgggacgaaattgaaactagattatttcctgatttagaagaagttttgttagaagcagaaatgaatgcagatcgatacagattccgttctgcaacaaatacagaaaacgatattgagcaaatgcttgttgtaattgaaaaacaaatggaccaaattctcggcggtttaaaagaattgcttattagtgaagaaaagaacgcgaaagaaagtagaatgacgaaagaaaaatttgcggaacttcgtcgggaagttttgacacgaggatttaaactaggagaaacactaccttatgtggaagcaaaactaaacagccttgctgaaaatttaaatcgctatgattcactaacagaccaagcagatcacttagaagctcgtgaaatcgttatatccgtccaaaaagaaatggcagttattgaagcacaaatggaacgcattccttcattactacatgaaacagatacaattttaccggaagaaatgaataaattgcgtgctggttatgaagaaatggttcgaaaaggttattatttagcccaaatggagttagataaagaaatttctcgtatgaaaacgcaaattgaaaaaatgaaacaaaatgtaatcaatcttgatttagatgaagctgaagaaggaattgaagaattacataatgaaatcgaattgttttacgatacgcttgaacacgaagcagaagcgcgtcatttcgtgaaagaaaatcacagtcctacttctgataaattaaaacgacaaaatactgtttctgatgcacttgctgaacaaatcacggaagtaaaacaaacgtatcatgtggcagaagatgatttagccgtttaccttaaaacaagtgctaaattaagtgaagctaaagaaaactttgagcagttgacagcattaattgctagcggagaaattgcttattctgcagcacaagatacactgaaagaaatcgatgcagctttactttctattagttcagaacaagataattttgcagaggaattgcgttcgctgcgtaaagacgaattagaagctcgcgatgatgcagaacggatgagacgagcaattatcacgcttgatcgtaaaatggaacgagaacgcttgccaggtcttccagaagagtatctatcactgcgagcacacatgggagaatctattgatgcacttgaaaaacgtttagaagaaaagcctttaaacatgaaagctgttagtcaagactggcggattgcggaagaagatttaactcatttaacggaaaaagcagaagaaatgatggaaaatgttcgcttagttgagcacgtcattcaatatgcgaaccgctatcgtttgcgcaacaaggagttggcagatgagttagttcaagcagaaaaccatttttataacgactaccaatataaaaaagcgcttgagattgctgtaactgcactcgaaaaagtagaaacgggcgcatttaaaaaagtagaaaaagcttatgaatcaaaagtaagcgtagatgatattgaataaagcctaaaaaacaaggatttctattataataataggaatccttgtttttttctaaattagtagttggaaagtgttggaattatgataaaatggagagtggaatatttgggaggagagtctattttttatgatttatttcgataatagcgcgacgactaagccaaatgctgccgtgcttgaaacatatacgaaagtagcaagtaattacttcgctaatccatcttcacttcatcgttttggcgctaagtctaaagaattgctagacacatccagaaaacaaatcgccactatgttagacgttttgccagaagaaattatctttacatctggtggaacggaagggaataatttagcgattaaagggctggcctatagctacaaaaaccgcggaaaacatataattacttctagtatcgaacatccttctgtacgtttagtaatggaagagcttgaggaaaatggttttacagtgacgtatttaaaagttgataaaaatggcgttatccagttagatgaattaaaagcggcacttacggatgaaacaattttagtatctataatgggcgtgaataatgaagtcgggagtattcaaccactgcaagaaattggcgagattcttgctagtcgggaacatactttctttcatgtcgatttcgttcaagggattggaaaaattccgctcgaaatcgataagcatgcgattgatttactaactttttcaggtcataagtttcatgctttacgcggcacaggagcacttgttaaacgaaaaaatgttcatttgcatccggaaattattggtggcggccaggaaatgggctaccgtagtgggacagaaaatttagctggtggagtggcacttgctaaggcattaaggttgacgctagaaaatgaatcaaagagagcagaactaatcgaaatccgtgattatttattaacggaaatcactcaaatgcctgatatgactgtccatacgaagaaaagcgtagccgcaccgcatatcgtttgtttttctgcaaaaggtcatcgcggtgaaattctagttcatgcattagaaaaagaagatatatacatttcgacgacgagtgcttgctcatctaaacaaaaattagcaagcagtacattaaaagcaatgggcgtgactgacgaagaagcaactggtgctgtgcgagtaagtctatcctacgaaaaccgtttatctgaagcgaaaatttttattcaaaagttgcaagaaattattgaaaatctaaataaagtggtgaaataaattggaatttgatcgtatgttaattagatacggagaactatctactaaaggaaaaaacagaaagcagtttgtgactagactggcacaaaatgtgaaacgcgcaatgaaagatttaccggaagtccgtattcacggggaacgcgaccggatgtatattattttaaatggggcggattatcaacttgcagaggaacgtttaaaaccgatttttgggattcaatcatttagtccagcagttcgtgttaatttagatttagatgaggtcaaagcggctgctctctctttagttcaagatgcgcacgaggaaaatggcacgtttaaagtagcggcaagacgtagccaccgtgagtttccgcttgattctaatgaaatcaatcaggaaatcggcgcacatgtgttacaaaatatcgaggacctgactgtcaatgtaaaaaatccagatgtaaaactaacgattgatgttcgtaaagaaggcgtctttttatcatgtcggacgattcttggggcagctggtcttccggttggttcttctggtcgcgcgatgctgatgctttctggtggtatcgacagtccagttgctgggtatttagcacaaaaacgtggtgtggagattgaagcggttcattttcacagcccgccatatacgagcgaacaagctaaacaaaaagcaatcgatttagcagggaaattggctaagtatagcggacaagttcaaatgcatatcgttccatttacagaaattcaagaagtaatcaaacagcaaattcctgagagcgtgattatgactgttacacgccgaatgatgcttcgaattacggatgaacttcgccgtaagagaaatggattagcgattgttaatggtgaaagtttgggccaagttgccagccaaacactcgaaagtatgctagcaattaacgctgtaacagctacaccgattattcgcccagttgttgcaatggataaaaatgaaattattcaaatcgcacaaaaaatcgatacgtataatttatctgtccaaccatttgaagattgctgtacgattttcacgccgccttctccaaaaacaaagccaaaacttgataaaatcgagcattacgaaagtttcacagattttgatgccttaattttaaaggcattagagaatgtagaaacgattgctgttaatgttgccgagaatgcagaaataaaagatgagtttgctgacttattttaagataaaccgtttatcctttttagggtaaacggttttttgtatataatatacataatgaataactaaaaatgcataaaatagttttaaatattaataaaaaaccatttgacattataaatatacatcactataatgaaaagtatcatttaataattaacgggaggggttaggatgaaagtttctattattggggcgacaggatacggagggcttgagctaatccgcttgctgcaccagcattcttcggtcgacatagcgacgttacatagtttttccgcacaatcagaaacattggcaaacttttatccgcatttaaaaggtttagaagctagccccttagagaagataaatccagcagaaattatcgaaaaaagcgatacagtttttattgctactccatcgggaatcgcgaaagatgtggccttaccgtacatcgatgccgggcttaatgtgattgatttatccggagactttcgactaaaagataaccagctttacgagaaatggtacgggaaaaaagcagcacctgaggattacttagctaaggcggaatatggtttagcagaatttcgcgataatgaacttgcgacttttattgctaatccaggatgttacgcaacggcgactttgttagggttagctccactcgtgaaaaagcagctaattgatcccacatccattattgtagatgccaaatcaggtatttccggagcgggaaaagtgccatctaaaagcacccattttacagaaacaaatgaaaatatgacactatataaaatgaattcccatcaacacattccggaaattatgcaacaactaacaaaatgggataagagtatccctgcaattcaattttccacttcattaattcccatcacacgaggaatcttcacaaccatctacgttaaacctaaaaatccaattacccagcaagaattacatcaattatacgaatccacctacgagcatgcttcatttgtccgaattcaagcagaaaatacttacccaactgtaaaacaagtaacggcttctaattattgtgatattggccttgcttataatgaaaaaacgaatgtaatcaccatcgtttccgtaatcgataatttagttaagggagcggctggtcaagcaattcaaaatttaaatataatggcgaattttgctgagagtgacggattgggatttattccagtgtatccgtgaaaggggaaagaaaaaatggagcttattaaaggaaatatcgcctcaccaaaaggcttttatgcagacggaaaacatgctgggctgaaaagaaaacgaaatgatattggttggatttactcagaagtaccagcaaattctgcggcagtttacacgatgaaccaaatgcaagccgcacccatttttgtcacaaaagattcttttaaaaatagcgcgaagttacaggcgattattgtgaatagtggcaatgccaatgcggtgacaggaaatcaaggaatgttagatgcgctttcaatgcgagcaaaaacggcagaaaaattagcgattccaatggatacagtcgcagttgcttcgacaggaataattggtgaaatgctcccaatggataaaataatgactggaatcgatttattagaaaaacaaacaggaaacgcagctgattttgaagaagctattttaacaacagatacttttcaaaaacagattagttttcaaacggaaataggcggtaagacagtcacgatgtcaggggtagcgaaaggttcaggaatgattcaccctaatatggctaccatgctcgcttttattacaacagatgctgccattccagctgaattattgcaaaaattactaaaaataaaagtagataaaactttcaatcaaataacggttgatggcgatacttctactaatgatatggtcgttgttatggcaaatggatgcgcagaaaacccgcttattcaagaaggaacagctgatttcgaaaaatttgcagctatgtttcaagcagtaacagaacaccttgctaaaagtattgctcgagacggtgagggtgcgactaaattaattgaggttcaagtaaaaggcgcgactaaaacagaagatgccagaatgatagctaaaaaaatcgtttcttctagtctcgtgaaaacagcggcatttggtggggatggcaactggggacgcattatttgcgcaattggttactcaggtggtcgttttgcaccagataacattactattaaaattggcggcatagaaatactaaatcatagtagccaaacaatttttaatcaacaagcattagatgcctatttagaagaagaacatatcgttattgaagtcgaccttcatattggccttgagtcaggaacggcgtggggatgcgatttaagttatgaatacgtcaaaatcaatgcatgttaccggacgtaaggagtgaatagaatgaaaaatacgatagtgataaaattaggcggcgttgcaagtgataatttgacagacgatttcttccagcaaattatcaaatggcaggcagagaaaaagaaaatcgtactagttcacggcggcggtcattatataacgaagatgatgaaagcacttgatattcctgtagagacgaaaaaaggcttgcgcgttactaataaacaagcgcttgaagtcacaaaaatggttttaattggccaagtccaaccagccatcactacagcttttcaaaaaagaaatatttctgttattggattaaacgcaggcgacactggtttgttagaagcggatcaaatcaatgattctgacctcggtttcgttggaaaaattactaaagtgaaaaccgctttaatcgaacaattacttgctgaaaatattatcactgtgattgcgccgcttggtatcaatagcgcgcatgattggctaaatgtcaatgctgatacagcggcatgtgaagtagcaagtgcgctaaatgcagaagcactttacttactaacagatgtcccaggtgtgaaaaatggagcaaaaattatcgacgaaatagctacggatgaaataaacaaattacaaactaccgacataataaaaggcggaatgattccaaaattagcaagtgccgcttttgctgctgaaaatggtgtcgggcaagtaattattacaaattcactggaaaatcctggaacaaaaattaaaagtaaggtggcgattagatgaaacatgtttttccgacgtataatagattcccggttgatatagttaaaggtaacggtacagttgttaaagacgcaacaggtaaaacatatcttgattttactagcgggattgcagtttgcaacttaggtcattgtccggagaatgttacagaggcgattcaatcccaattagcaaatatttggcatacttcgaatttatatgaatgtgcactgcaagatagcgtggcggaattaattactgatgggacagacaaactagtatttttttgcaatagcggaacagaagcaaatgaggctgctcttaaattagcgagaaaatatacaggcaaagaaaaaataataacgtttgaaaaatctttccatggacgtacttttggttcgatgtcagctaccggacaagctaaaatccatcaaggtttcggaagacttgttcccggctttacatacgttccctataacgacatagagtctttcaaaaccgagcttgacgaaaatacagcggctgtcatgttagaggtaatccaaggtgaaggcggcgtcataccagggaatgcagcctggctaatggaagttcaaatgctatgtaaaaaagcgggcgcattactaattattgatgaggttcaaacaggacttggtcgaacgggaacgctttttggttttcagcaaacgttcttagatccagatatttttactttagcaaaagggcttgggaacggcttgccaattggagcaatggtcggaaaagaacacttaagcagtgcttttggtccgggaagtcatggatctacttttggcggaaataaactggcactcgctgctgcgaaagaaattttattaacaatgaagcaaaccggatttttagaagaagtgaatgctaaagcagcttattttagaaatttattagaagaacattttgagcagttagaaaatgttgtggcgattcgcggtgaaggctttctcattggcatagaactgggtagtagcgcggcgccagttgttacagaattacgcgataagggtttattaatactaacagccgggcccaatatattacggattttaccgcctttaactgtcagctatgcagaaatagatcaagcaattagcatactaaaaagcgttttggaaaaacaattgattggaagtgagtgagatgacgatgtacgtaaaaagtaatacgacaggaaaagatatgttaagtttacttgaatggaataaagaagagttgatcgatattattaagctagctgttgcgatgaaaacaaatccagcccattatagtcatattttaagtggaaaaattttaggaatgatttttgataaaccttccactagaacacgggtttcttttgaagcggggattttgcaattgggtggtcaggcgattgtaatgagttctaaggaacttcaaatcggccgcggtgagccaattaaggacacagcgcatgtgatgtcagaatatattgatgcaattatgatccgaacatttagtcatgaaaaagtagaagaattggcgtatcatgcagaaattccgattattaatggcttaactgatttgcatcatccatgccaggcgttagcggatttaatgactatttatgaatggaaagatcagttggaaggtgtcaaactagcttatattggtgatggtaacaatgtatgccattctttactgttagcaggtgccatggttggactagatatacgtcttgcaatgccaaaagggtacgaagtcgatgaaacaattttagcaacggcggagaatctggcgaaggaaagtggtgccaagattttcgttacggaagacccaaaacatgcagtgacagatgcggactttatttatacagatgtttggacaagcatggggcaagaagaggaaaatgcgaaacgtttagcggattttggcgaaaaatatcaagtgaacgcagagttagctagcattgctaagccagattatcatttcttacattgtttaccagcgcaccgagaagaagaagtgacagctgagatcattgatggcaatcactcggttatttatcaacaagcaggaaatagacttcatgcgcaaaaagcgttgctagcagccattttagaagcgaaataaaaaaagtctggcacttacgccagacttttttattataagaaattacgtttcactttatcccagaaagaatttttaggtagtttgataatattgataaaacgatcgcctacttctaaattaacttcatgcacgtgttggatactaagtgcttcgctgtccattccaatcattgggaattcgttatttccttcttcagacgcaatttcaatacgtagtttgcgttttggactaaggatgaacgatgatcctagcgtacggaatttattgttgttaatagaagctagttcacttacttgcatagatggaagaagtgggtccacgatggaaccgttcactgatttattataagcagtacttcctgttggtgtggaaattaccattccgtcgccgcggaaagtttcgaagtgagaatcattaatataaagatccatcgtaagtgttctaatgatagaggaacgaatattaaactcatttagtacataaaatgctttggtattattcactgttccataaatagttgggtaacgacgtactaaccaacgatcttcaatagctgccttgatgatttcatccaattgattaatatggaagtcacagtattgacctaattgctctgttagcgcaatccctgcatataaacaatcttgacggaagccagtttctcttacagatttaagaaaagcaccatcaccaccaatgctgataataacgtttgctttttgatagtcatcagttaattcatatccataatcagtcgtaattttcttcaattcttttgcttttgcatgtaactcttctgtttttcgataggaaaaataaaaaatagtttttgccatgttagttgtccctccagaatccaattttaatcaacaaacttattataacatgacttaagggcaatttctttcttcatccgtaaaaaagtgaaatggaacacaatttaagagaaagattgtacaaaataaaagagactgttattattacattatctaaatagaaaaaggggagaaattaatgaacgctaaaagatgggttgcactagggattgtttttgcacttttgatagttagtgcgttagcaaagtttacttcaagtcaaatcgcttcaacggaagagagtagtccgacatttgtcgaaagtctgttcgcggataccggcgaactaaccgaaacagtaattgaagaaggtggggatgatacaattgctgtattatctgtagatggtactattcaagatacgggagattctggttctttatttggggacgcgggctatgatcattcatttttcatgcaacaattagaacaagtgagaaatgatgactatatccaaggcgtactgctgtatgttaattcaccaggtggcggtgttatggagtccgcgcaaattcgcgataaaattttacaaattcaaaaagaacgcaatattccattctatgtttccatggggagtatggcagcatcaggtggatattatatttccgcaccagccgacaaaatttttgcaagtaaagaaacattgactggttcacttggggttattatgcaagggtatgactatagtgaactcatgaaaaaattaggtgtttcagataatactattaaaagcggcgaatataaagacattatgagcgggacaagaccaatgacggaagacgagaagaaaattatgcagtcaatgattgatgattcttacaatgagttcgttaaagtcgttgcaaaaggccgtggaatgtccgcagaaaaagtacgtaaaattgcagatggacgcatatacgacggccgccaagcaaaagagaacgggttgattgatgagtttggttatcaagaagatgccctagaagctttgaaaaaagaacaagggttagctgatgcgacagtcattcaatatgatgtaccagaagactttagctcgttattctctgtagctgcacaaaaaatctctggtcaaaatgcagatatttcccaactaatcaaattaactggcacacttaaagcgccaagaatgatgtatttatatggagaataatgtgagaggagaggcgcaaatggctaatgaaaatgttgcttttgaaaacaaacgccaagtctatcattatgaaccaccaattcagaaagaagaagccattcctaaacagtactttgctggcttttggatccggtttttagcttatttagtcgatttagttgtcatcgcagccttaaagggaattattattaatccgattttccgcgtctctggaatggggatggatgacagtttcttcacattttattggggaatgacaacgattatctttttagcttactttattttgcttactaagttttttggacaaacgcttgggaaaatgttatttggtcttcgcgtagtgaaacttgatggtggaaaattaacttggttaaccgttttatttcgagaaggtgcgatgcgttttgtcttaaaaaccatttggccgttatatgtggtttgtgcctttacaccaaacaaacaaggcattgcggacttctttgaatccacatctgtcgtccacacggggtacttagaactagatgaaaaatgggtaaatggagcaaaaaaatagcttatagcaaacttcttctttaaaatggaatagaagcgtacattaaaggaggaagaaaaaatgactcaagtaacatttaaacataatccagttacactcgtaggtaccgaaagaaaagttggcgacaaagcgccgaacttcacagtggtgaatagagatttagaagaagtaacattgcacgattatgacgggaaagtgagacttatcagcgttgttccttccattgatacaagtgtttgttccacacaaacgcgtaaatttaatgaagaagcaagcaatttagataatacagttgtcttaactatctccgttgatttaccatttgctcaaaagaaatggtgtgcagcagaaggtttaccaaatgcgattactttatctgatcaccgcgatctttcttttggcgaagcatacggtgtaatcatgaaagaacttcgcttactagctcgttctgtttttgttgtaaatgcaaaaggagaaatcgtctacacggaagtagttccagaaggtagcgaccatccaaattacgaagcagcgatagaagcagccaaaaaagcttaaatcttaaaagcattcctttatgcaggggctggataaaacagtaatatgttatgcagagacggtgtagccttacggctacgccgtttctgctttttctttgtttggtcgctcaactacaacaggctggaagcgttccagtggtggcagtatccccacaagattgtaactgatatgaatcccctgtctgcgcttgccagtgcttttgtccggtgcttccacaaataccttgatcacaaggtcattgaggatggcaggggtcaatgtttctaggctagagtaccgcttgcacttggcaatgaaatcttctacctgtgtggtcttttgttcctgctgatcaatctctttttctagcattgtaatcatttgccgcagtgttttctgttccagatcatatcctcttgacaactgcatgaagcgttcatccgtcagcttcccactagcgttgtcctcatagactttacggaataatacatccagatcatctacacgcttctgagactgtgctatttgtttccgcttggcacttaactctttttggatttccgtggaacgttctgcttcgatggacacccgaaagctgtcctcataccgctgtacaaagccaatcacatagcgcatgtgcgccagtaccatttcttccagcacaacagcacggatgaaatgggatgtacacgggtcaaccgctttttgcgaagcagaacaccggaaatggtcatgccttgtctcaaagtatctggttgtgcagtaatacagcttgctcccgcaatcagcacaatgggcaatgccgctgaacatattggttttaccagtcttagatggcctacgcttgttctaacgcagctgctggacggtatcccatacatcctgttcaatgataggctgatgggtgttttcaaataccatttggttttctttcgggttcttccgctgtttcttattccgaaaggattccttgtaggttttaaaattcaccgtatgccccagatactctttccgttcaaggatatgagccacggtactgtcacaccatttacatcgatcagcgggaacatcagcaggtgcgcttctgccgtttgactttgcataagcagacggtatcagcaccctgcgctcagataatatccgagcaattttagtggggccgttaccctccatgcaaagccggaatatctcacgaacaacctcggcggcagcttcatctacaatccagcgatttttgtcctctgggtctttgatatatccataaggcgggaaggtgctaagcggtttgccggattgtccttttgctgtaaacacagctttgattttcttactggtatctttggcgtaccattcattaatcacattgcggaatgcgatgaactcactgacgccttgattactgtcaacgccatcattgatagcgataaaccgaacacctttttccggtagttggatttcggtaagcagaccaaccttcaaataatccctgccgagcctgctcatgtccttgactattacagtagatactttttcctcatcaattagagcaagcatttcattcagtccgggacggtcaaaggtagttcctgataccccatcatcaataaagaagcgagtgttgagtaagcggtgttcttctgcgtactttgagagaattgatttctgattcacaatgctgttgctatcgccttgaagttcgtcatcacgagatagacggcaatacagggcggtgatttgttcaggctgctggttcataatttttccattttcatcaacttgatagttcaacgtttttcctcctgttttaaaatagcacaagtaaattagccaaacggttcactaattctccaagccgataacgataccccataataaaagatgtatcggagatatagatatcctttctccccttggctaccacttactcacttgttttcgacctgtcaagccctgacgtagtcagcaaagtttaggcttgatgggtcggaacaagtgagtacactccaaacaagggagagaaggattttgcttcatatattaccgtcttaaaaaagctgttttcggataacttaacacattttttgttgatacagctataataattactaaaaatattttaggcttttgcccactcacaaaacatgatttaaaaaaggggtatggcggaaggtggctggtgtatagccacttcctatgcttgctctgcttcctgaatattttattaactttaaaataaagcttgacctaaagcgcactttatagtgtattcttatttatgaggtgaagaatatggaatatattgcgcatgaagtggctgagaagttgggcattacagttcccacactgcactactatgaaaaagctggtttgcttccatcaataaaaagaaatagtgtaggaaatagaatatacacagaagagaatattgaatggctttacatgattgtgttgatgcgggaagttggcgtaccgattcgtgaaatacgctcttacatacaattattgttgaagggccctgaaacaatccctgaacgctatcaattagtaacgcagtacaagcaatctgtagaagaaaagatgaaggcaatgcaaacttctttaaaatggctgggtgctaaagtgaatttctatcaggaaatgatggatacaggggagaacaagccttgccgtacctttctggaggaatctgaactttttaggttgaagcaagcggaggagcaaaaatgagaactgtcttaataacaggcactaccagtggtataggctatgcactaagtgagctttttgctaaaaaagagtgtcatgtcattttggtatcacggaatgctatgaagctatccgcacaaaaacaaaagctggaaaacggaaataaccgtattgataccattacatgtgaccttgaacagactaatgctgctgaaataatatataaatctattaagcagaacggatggcaagttgacatattggtaaataatgctggctttaatgaagcagggttattttctgaaacagatgccacatgcgaacaaggcatgataaatttacatatcaattttgtaaccgatatgatgaagttgtttattcctgaaatgattcagaatagtcatggacatatattaaatgttggttcaaccggctcctacattgcttgccctaaagatgctgtctatgctgcttcaaaagcgtatatccttcatctttcaaaagcggttcatgctgaattaaaaggcacaggtgtcacagtaacaacgctttgccccggctcaacacgcactgaatttgcacataaagcaaaaatagaacacacattattatttaagatattcgttatgtctccccataaggttgcgttgtccggcttgcgtgctatggaaaagggcaagtctgtcataataccaggtctttataataaaattttagttttatgttctcgattattgccctattcctttattggctggatgacgaaaaaaatgttatagaaaaggaggatatcaccttgcatttactcatcataaatggcagtcctcgcaaaagtggtgctaccgcaaaaattttaacctatatccatgaaaaactctgcacaatggattcggaacttgaaataacgcacattgatttaagcaattataatttaaaattgtgtgtgggttgcatgggctgctataaaactggatattgctttattcaagatgatggagtggaaagattacgcagtctcatcgatcaatgcgatggcttgattcttggaagtccaacctataccagcaatgtatccgggtatttaaaaattctaatgtatcgtgggtattttatttttgaacaacttcttagaaataaaccatgtttctctgttatcacttatgagaatgcgggtggaaaaaaggcacaaaaaattctaaatgaatttatacactattctggtggctcggttagcggacattatagaaaaaagctgaatcacggttcagaggtattaaacaaggcaactgaaaaaaccatagatagaaaatgtgcacagtatttggtcagagcaaaaagaacaatgtctttatctgttcttgaaattgtgatgagagctattgtttttcatgtaggacttcgcagacatgcaatgaaaaatccagttcgctataaagcagttattgatcgttggaataacaaaggctatacccagacgagatagtcaaacgaaatctagagacagcattaattaagaaagtgtaaccaattttagggtagtatagtttacttaatttgatagaatagaaaaaactaaaccggttaaatgatagggggatacatgtgaaactgacgaatgattttatagagagaaatatgcggcagtttcaccgatatgcactaagaacccttcattacgcagctctcaccgcctactatgagcggctgcggttagggaaaaatacaatcacattttcaagtctatcctttcaagaaacccgtctcctttatcgtattgatcagcactttactgacgatactatcttcaatgtattggattatgaaattattgtacaagacaataatctggctaacgcattaaactgtctgccagagcagggacgtaatatcattctgctcaaatactttcttgggtggacagacagaaaaatcggagaggctttttcaagttatgactcttcaacacgcaaacgtcggttagcggcattaagggttctacggataatatatgaggaacaaaacggtgagtaaaggaaaatacatacattttgatactttagtatcagctaagacaggtgatatcgtggctattcaagacattttaaatcaatttcgtggatatatcataagccgctctctgcgaacggcttaccgatcggacggctcactctaccaatatattgacaccgatgttcagcacaaaatggaaaccgacttaattgaggccatctataaatttgagattcgttaaatttttcatttcatacataacaggtattcgtctttattactgttaataaaaggtgccaaaataaaggtttaattggtctgtcatcggagtttgattcggtactggacgattccccttctaaggaatagataagtaaaactgtagcaatttagaacatgaaaaaagctagtaacggcaaagcaaaaccgttactagcttttttgtagacaatccatgttggcggctggtattagtcaaatgttttggattactgttttatccagtgtcgccataaataggagggcttttttctgtattactactaaaaataaactgtactaattataattaaaaatttccagcgttaatttccgcttttactacagaaaatcctttcacattctttagaaatactgtataatgtttggtggtgttagtaatgatgaaaattcgaggtgttacttttggcaaatgaagcaacgcaagaattatttcaagtgcttgataatacagctattatcttgcaaaatgagcttgaaataagctatttggaagcggtttatgaaacaggagaaaatctgtttcaaaaagaagttttacaaaaagaagagttgtcttctgaaaaacaattgaaattacaagcgtcttacgaaagtatcgaacttgagaatttctcaaatgaagaaatccgcaaaggtcttcaattagcactactaaaaggcatgaaacatggtattcaagtgaaccaccaaatgacgccagattccattggttttatagtggcatatttgcttgaaaaagtaattcaaaagaagaaaaatgtttctattttggatccagcctgtggcactgcaaaccttttaacaacagtgattaatcagctaggattaaaaggcgatgtagacgttcatgcgagtggtgtagatgtagatgatttgcttatttcgcttgcactagtaggagcggatttacaacgacaaaaaatgacgttgctgcatcaagatggtctggctaatttattagttgatcccgtagatgtcgtaattagtgatttacctgttgggtattatccggatgacgaaaatgcaaaaacatttgaactttgccgtgaagaagggcattcatttgcacatttcttgtttatagaacaaggaatgcgctacacaaagccaggaggatatttattcttcttggtacctgacgcaatgtttgggactagtgactttgctaaggtggacaagtttatcaagaaaaacggtcatatcgagggaattattaaattgcctgaaacactgtttaagtctgaacaagcacgaaaaagcatcttgattttacaaaaagcggacgtagatgtaaagccgccaaaagaagttttactggccaatctctcttcgctaacagatccgagcgtaactgcaccgattttagctgaaatagagaactggttcaaaaggaaacgataatggaaggaattgacaaaaataaaatggaaaaaacgattgcaattaacgccggaagttcttcactgaaattccaattatatgatatgccatctgaacgtgttattacagcaggtattgtagaaagaattggcttgaaagattctatttttacaattactgtagacggagaaaaaatcaaagaaattattgatattcctgatcatgaaattgccgttcaaatgttacttgaaaaattaattaatcacaaagttatcggttcttacgatgaaattactggaattggtcaccgtgttgttcatggtggagaaagattccctgaatcggtttatattgatgaccaagttattaaagatattgaagcactatctgaacttgcgccacttcataatccagcaaacgttactggaattaaagctttccgtaaaattttacctgacgttgtttcagtggctgttttcgatacagcattccaccaaacaatgcctccagcaagctacctttacagcttgccgtacagctactatgaagattatggtatccgtaaatacggtttccatggtacaagtcacaaatatgtatccgaacgcgctgcagaacttctaggtcgtcctgtagaagaattacgtttactaacttgtcaccttggtaatggtgctagtatcgctgcaatcgaaggcggaaaatcaatggatacttccatgggattcacaccactagctggcgtttctatgggaactcgttctggtaacattgacccagcgcttattcctttcatcatggaaaaaactggcaaaacagcagaacaagtacttgatgtcttaaacaaagaatccggtatgcttggtgtatctggtatttcaagtgaccttcgtgatttagaagatgaagcagcaaaaggaaacgaccgcgcggaacttgcacttcaagttttcgttgaccgtatccataaatacattggttcttatgcagctcgcatgaacggtgtagatgcaattatcttcacagctggtatcggtgaaaatagttcttatatccgtgaaaaagtacttcgtggacttgaattcatgggcgtatactgggatccagcacttaaccaagtgcgcggagaagaaagattccttaactacccacactccccagtaaaagttatcatcattcctacaaacgaagaattaatgattgctcgtgatgtagaaacaattaaacaaaaccattaaaataaaaaaaactcgctcttgaatttcaagagcgagtttttttatttagctttattctttataatcaggaacatcattacgaactacaagcacatcacaaggggagtggcgaataatatattcagatacactaccaattaataaacgttctacagcgtttagaccagtagcaccacacataattaagtcagcttggaatgcttttgctgcttcttttgtgatggctgtttttggcgaaccgtattcgatatagctttctactttagttacgcctgcttttaaagcatcttctttatagccgctaagtaattcatccgcatattcagtcgctttgtcagccatgcttgtatcataattggctacggacgagaaagcacgtgtatcaataacatgtacaagaccaagtgcagcatcattacgattagccacttgtattgctttttggaaagctctttctgcttctttggatccatcaactgctactaaaactctttcgtattgttgtaacataataattcctccaatcaaaatatgtatctactatatttatattttaccctttttttcctaaaagaaccataaattggaaaataaattaagaaaccatgaaaatcctttacttttgtaataattcttttgtttaaatttaagttagttaattttttacaatttaggtatattgtgttagcatgggggtgtggaaaatcttttatagtctattatacctataccaaggagagtgattttgatgttgatcggcgtaccaaaagagataaaaaataatgagaatagggtggcaatgactccggcaagtgttttttcctatgtaaacgcagggcatactgtatacgtggaaaaaggcgcgggaagtggctctaattatcaagacgctgattttgtgcaagcgggggcaacaattgtcgaaacagcaaaagaagcttgggacgtagatatggttgtaaaagtaaaagaacccattgcatccgagtatacatattttaaagaaggcttattacttttcacatatttacatttagcgaatgaaccaactcttgcgaaagctttgctagagagtaaagtaaacagtgtggcttatgaaacagtagaacttgctgatcatacactaccactactttctccgatgagtgaagttgcaggaagaatggcggctcagattggcgcacaatttttacaaagaacaaatggcggcatgggcgtgttgcttggtggtgttcctggcgttgaaaaaagtgaagtcgttattattggcggcggaatcgctggaacaaatgcagcaaaaattgccgtaggtcttggcgctaatgttacaatactagatatgaatttaaaacgacttcgccaattggatgacattttcggcaaccaagtacaaactttaatgtcgaatgattttaatattgaattagctgtcaaaaaagcggatttagttataggagcagtattaatcccaggcgcaaaagcaccaaaattagttaaggaacatgttattaaacagatgattcctggctcggttcttgttgatattgcaattgatcaaggcggaatttttgaaactaccgaccatgtttccacacatgatgatccaacatatgaaaaatatggagtgcttcattatgcagttgctaacatgccaggagcagttccgcggacatctacgctagcgctaacaaatgcaacattaccgtttggattaaaacttgcaaatgatggattagaagaggctgtgaaaaaagatccttacttgctacgtggtttaaatacgtatcaaggtcacattacgtataaagccgtttctgattctctcgacttaccatatacaaatagtgcagaattaatttaataaaaaaagcaaacttccgcgtggaagtttgcttttttgttatttgataacttgtaaagttttcgggaattcagttagtacctgaacaccatcttttgtaacaactaaatcatcttcaatacgaaccccagcgactcctggaacgtaaatacctggttcaattgtaaataccatattttcttgcagttccatgttgtttgtttctgtaatggaagggaactcgtgtacactagctcctagtccgtgaccaagacgatgtgggaaataatcgccgaaacctgcttcacgaataatatttctagcagttaaatcaatttcgcttgcttttatgccagcttttactttatcaaccgcagctacttgagcttctaaaacagtatcgtaaatctttttctgttcatcagtaatatcgccaaatgcaactgtgcgcgtaatatctgaacaataacctttatgaactactcctaaatcaaataaaactaaatcgccttttttgatttttgtttctccgggagttccgtgtggtagggcgccgtttttaccagtgagtaccatcgtatcaaatgacatggctgtaacgccttttttcttcatttcatattcgattttggcaacgatttctgcttctgttttaccttctgcgatttcatcaacaccgacttggacagcgtaatcagccagtaaagcagcttcttttaaaatcttaagttcagcttctgtttttataaggcggatttgttcaattttatgttcaatcggaatgaatgagctgccagagaaaagtcctgctaattgttcgtaacggtcgacactcatatgttttttctcaatggcaaatttacttggatttgctacacgttttttgatttcatctgcaataattttgaatgggttttcggtatcgttataaccgtatgccgggtgggaccaatcgccgccgcgtacatcttctacttcaagtgctggcgtgaataaaaacggttcgctttccgggaaaacagctagccctagcacgcgttcatgaggctcactatgataacctgaaaaataagcgatgttttctgggtctgtgataaatgccacttcggcaccttggtcttttagccagttttgtaagacatcaatatttttttccatttttgtaccttctttccaattgatttctctacaatgataacatgcaacggaaatattttggtaataaacacctcctagtttacgaggtgttatatattagtttataataatagtggtacaataatacacatagaataattaatcaggaaggaagttttttaacatgaagatttcatttcatggtcagtcttgtattaaaattatcactgggaatacgactattctagttgatccatttatttctggtaatgaaaaatgtgatttaaaagcagaagagcaaatgccagattttatcgttctgtcgcatgggcatgacgatcatgtcggtgatacagttgaaattgctaaaaattcaggagcaactgttatctgtaatgcagatttagcttcatttttagcggtagaagatgggcttgagaacattgcgccaatgcatattggtgggaaaagacagtttgattttggacaagtgaagttgacacaagcatttcacggttcgcaaacagtgcgtgatgggcgtataattaaccttggttttccaacaggaatcgtttttacaatagaaggtaaaaatatttattttgctggagatactggtttgttttctgatatgaaattaattggagaattaaatccgttagatgttgcgttcttaccgattggcgataattttaccatgggtccagaagacgcggcgattgcggcacgttttttacaagcaaaactagttattccaatgcattacaatacatttccgttgattgagcaagatccacatcaatttgttgcgtcgcttgatgaaggtatttccggaaaagtacttgaaattggggaaggtatcgaaatctaacaaaataggaatgggtgaacgagtcgtggccacaaaacatgaacagattttaaaatacattgaaaatcttgcagttggcgaaaaaatatctgtgcggaaaatcgcgaaaaacctgtcagtaagtgaaggtactgcttaccgggcaattaaagatgcggaaataattgggtttgtttctactattaaacgagtaggtacgcttcgaattgagcggaaacaaaaagatagcatcgagaaattaacttttgctgagattgttaatatgattgatgggcaagtgcttggcggtcgtgctgggttatataaatcgctcaataagtttgttattggtgcgatgaccgtggaggcaatggaacgctatacggatgccggtaacttattaatcgtcggaaatagggtgagtgcacatgaacttgctttaaaacgcggtgctgcggtacttattactggtggttttgatacggacgacgaagtaaaacagttggcagatgagaaggaattaccaattttatcaacgtcttatgatacttttacagttgcgacgatgattaaccgggcgatttacgatcaattgattaaaaaagaagttgttttcgtagaggacattttaacgccacttgaaacaactgcttatttgtccacatcagataaagtggaagattggcataaaatggaagaagcaaccgggcatagtcgttttcctgtcgtaaatcgggcgatgcgtctaactggtatggttacgagtaaagatattttagaaaaaaatccgagcatttcgattgaacgagtgatgactaaaaatccactaactgttggtccaaaaatgagtgttgcatcagtggcacatatgatgatctgggaaagtatcgaagtcatccccgttgtcaaagatgatttaactttaatcggcatcgttagtagacaagacattttgaaatcgatgcaaatgattcaaaaacaaccgcaagtcggcgaaacgattgacgatacgattgcaaatcaactttccgaaaaagcagatacgggcgaagaggcagattacgaatttaaagtgagcccacaaatgactaactcgctagggactttatcgtatggtgtatttacccaagtggtctgcgaagttgtgcagcaaaaactattttctatgaaaaaaaggaatgtggcgattgaaaatgtaacgatgtattttctaaaacctgttcaaatggatgcgacaatcgttattaaaccacgaattctggaaatgggacgtaaagctgggaagttagatgtagagctttatttagaagggattttgaccggaaaagctatagtcgcttgtcaaatgatggaacgttaaaaagaaacagaggcgaaacaatgaaaagtgagattttacaacaaataaaacaatatgaaacgattattttgcataggcatgtacgacctgacccagatgcatacggttcgcaaatgggacttgcagaaattatccgagctagttttcctgagaaaaaagtctactcggttgggaatgatgaagtgtcgctccaatttctaggtgcagtagatgaaatagccgatgaagtatataaggatgcgcttgtaattgtgtgtgataccgcgaatcaagagcgagtttctgatgtgcgtttttcctcaggacagaaattaattaaaatcgatcatcatccaaatgacgatgcttacggtgatttactttgggttgatacgacggcctcttcttgtagcgaaatgattgttgctttttgggaaactttttcagatgaattaattttgaatgaaacagcagcaagactcctttatgctgggattgtgggcgatactggccggttcctgtatccaagtactacagaagaaacgctacgtttatccgcgcatttagtaacatttccgtttgatcgtccggcgctttaccgtgaattatatgagctaccaaaaaatacggtgaagctttcagggtatattttgcaaaactttgtcatggatgaaaatggcgctgcaaccgtttatttaagtgatacgcttttgagagagtttgaagtagatccgcgcgacgcttccgcacttgtatcttgcatcgaaaatgtggaaggaattaaggcgtggattatgttcattcaagaaggcccggttttcagagcgcggttacgttcaaaaggaccagttattaatgaactagccaaagaatacggtggaggcggacatccgcttgcttctggcgcgactcttcataatgaagaagaaataaaagaaatgacagtaaaacttgcgcgcatctgtgcggctaaataaacaagaaataaagccagtttaactagctggctttattttttatataaaaacgcgaacacactttcttttttttagcttaaccgatataatggaaaaagagagttttgaaaggagagaggatagtggggtttgttcatttacaagttgcgagtgcttatgatttgctttctagtacagcatcaatcgataagttaatcgctaaagcaaaagaataccattatccagccttagcaattacggataaaaatgtactttacggagtagtcgagttttatcaaaaatgtttagcggcggatataaaaccaattatcgggatgacggtgacaatacaaggttacttaaatccaattaattcatatgagttgatattaattgcggaatcaaccgctggatatcatgagttattaaaaatcgcgagtgccattcaaacgcgggaagaaggtcccgaattaccgcaaagttggctacgtgcgtatagcagtaatttaattgccatttcacccggcgccaaaggagaagtagagcgtcttcttatggaagaaaatcgcgacggggcactagaagtttacgagaacttagtcagtatttttggcaaagaatccgtttatttatcagcccaaaaagaaaacccacgtctttttgctaaaatagaagctttttcagcagaagaaaaggctcctgttgttgcaacgaaagatgtccaatatatggagccaaaagatgctcaggctaaagaagttttgactgcgatacgtgacaatcggactgtggattgggcgacattgccactcgcaggcccgaattattttacttcacaagctgaaatggagcgtgactggcaaactggtttcgaaaaacaggcatgtctcgaaacagagaaattagccgaacgctgccacgttgaaattgccttagatcagcatttattgccaagatttccgttaaatgaagaacaaaacgcacctgatgttttaagagaaacggcttatgctggcttaaaagagcggaatttattagcaaaagaataccaagaacggctagattatgagctaaaagttattacggagatgggatttgcggattatttcctaattgtttgggatgttatacgttattctcgagaagcaggaattttaactggaccaggtcggggttctgcagcaggatcgcttgtttcctatgcacttagaattaccgatgttgatccaattcgttataacttgctatttgaacgatttttaaacccagaacgaataacgatgcccgatattgatttagattttccagataatcgcagggatgaagtaatttcttatgttgtatcgaaatacggcgaggcgcatgttgcccaaattggcacattcggaacattagcggctaaagcggcgattcgtgatacggccagaagctttggcttgaattcagtacttttatcagaatggtcgaagttaattccgagtcaattaggcattactttacaaaaagctttacaagaaagtccacggttagaaaatcatattaaaagttccaaagaaaacgaaatgatatgggaagtagcttgccaactcgaaggtttaccgcgccacatttcgacgcatgctgccgggattgttattagcgataagccactcgtcgaacaggttgcgcttcaattaggtagtggggatgctagattgacccagtttgctatgggggaattagaaaaaatcggcttacttaaaatggattttcttggacttagaaatctaagtttattagatcgtgttttaaaatcagttaattataatagagaaacgccattaactttagcagatatttctttggaagataaaaaaactttaaaactcttccaaaccggtgacacgacaggtgttttccaatttgaatcggatggtattcgccgcgtacttcggaaactaaagccgacttcttttgaggatgttgtggccgtggatgccctttatcgcccaggtccaatggagcaaattgatactttcatcgccagaaaacatgggaaagaaaaaatccaatacccgcatccagatttagcacctattttagaagtgacttacggcgttatcgtatatcaagaacaaattatccaagtagcgaatcaaatggctggtttttcacttggggaagcagatttattaagacgagctgtcagcaagaaaaaagcagatgttttaaacgaagaacggattcattttgttgaaggagctagaagtaaaggttattcagagagtagtgctaaccaagtttatgatatgattatccaattcgcgaactacgggtttaaccgaagtcacgcagctgcttactcgaaaatcgcttttcaattggcctatttaaaagcccattatccagcagcatttatgtcatcacttcttagttctgtttttggaaatgatgacaaaatttctcaatatatcacagaagcaaagaactacggtatcaacatgttggcaccgagcattaatcatagtaattactactttcaaatggaaaacgagacctcgattcgttatagtttccgcgttattcgaaaagtaccaacgaaatttattttagaaatcatcaatgaacgaaaaaaagcgccttttaaagacttctttgatttttgtgaaagaatgccacataaaatgctttcagaaactgttctagaagcgcttgttttttctggttgttttgatgaatttggcgaagaccgggcaactattttagcaacaatagatgcagtactgcaatacatttcattactcggagaagattcaaaagggatgaatctttttgcggaagatgacgattttttgaaaaaaatgaaaccacgctaccggaaaaccgcaccaatttcgattgatgaaaagctagaaaaagaaaaactatatacaggtcaatatgtttcggcacatcccgtatcttattaccaaaataaattacaaaaccttgctattacaagactagcaagtgttagctctgggaaaatttatcaagttgcagcctatgttcatgaggtgaaatcaattcgaactaaaaaaggtgaaacgatgtgttttttgactattagtgatgaatcaaaggaattaagtgcagttatgtttcctgaaagctaccgaaaatacgcgaattttgctcaaaaaggagaaattctttttcttaaagtgaaggcagatacgaggaatggcgaacttcaattaattatcaatgaagcccaagacttaaaagaaataaaagctccggtaagactatttttaaaagtcacggaatcactgcaaatggagcaaataaaaccgattttagcgcgtcataaaggggatagtaaagtcattattcaccaagcgataaccaaacaaacaaccgaactaaaaaatattcaagtcaaaccgtcaaatgggttgcaagaagcgctagtagagttgcttggtaaagagaatgtggtgtttaagtaatcttagactttctatatttatagaaagtatgttatagtttaacgtggaaaacaatactgcgcagtctgtccattttgattcggatagactggcattttgtcttcttgtgggaaaatgcggttgaaatatgtttcacgtctttattcatttttcatttatataacattaaaatcgttatgaaccacaatagaaagcgtaaatggggagggttatccttgctaggagacttgtttacaaaaccaaaaaagagaaaatatgccacaattccttctgatgggacgaaagcggatgttccagaaggtattatgacaaaatgtccagaatgcaaaaaaataatgtataccaaagaattgcaaaagaatcttatggtatgtaattattgtggttttcaccatccaattggagcaacagctagaattgatatgttagttgacgaaggttcgtttgaagaacttgatgctaatttaacaacggcaaatccacttggttttgaaaattatatggatcgaattgagaaagataagcagaagagtggtttgaatgaagcgattgttactggtcatgctaccattgatggtaatccgcttgtgattgctgttatggactcgcgctttagaatggcgagtatggggtcagtagttggcgaaaaaatccttcgcggggtagaagaagccgataaaacaaataaaccatttgttattttcacagcttctggtggcgcgcgtatgcaggaaggaatgctttccttaatgcaaatggcaaaaacttctgcagcatttaaacggtttagcaatcacggtggtcttgtcattactgtgatgacacatccaacaacaggtggtgtttcggctagtttcgcatcacttggagactataattttgcagaaccaggcgcacttattggtttcgcaggacgaagagttattgagcaaactgttcgtgaagaactaccagaagatttccaaacagcggaattcttattaaaacatggacaactagatgactgtatttcacgtcttgatttaaaaaataaattaagctttattttaaaaatccatgtgaaaacacctgaagctggaggtgaatctgatggcgaatgaaatggaatttgagaaaccaattttagaattaaaaagtaaaattgcagacttaaaagaatacaatgaaacatcagatgtagacttaacgaatgaaatcgagaagttggagaagcgtctagctaaattagaagcaagcatttatagtaatatgactgcttgggacaaatttcaagtggctcgtcatccagaacgacctacaacacttgattatatctcgcttttattcgaagactttatggaacttcacggcgaccggacatttggagatgacgctgcaatagttggtggaattgctacttttaaaggcactccagtcacagttattggtcaccaacgcggtaaagatactaaagataatttacatcgtaattttggtatgccgcatcctgaaggcttccgcaaagcgcttcgtttaatgaaacaggcagataaatttggtcgaccaattatttgcttcattgatactaaaggggcttatccaggtcgcgctgcagaagaacgtggtcaaagtgaagcgattgctagaaacctttatgaaatgagcgatatgaaagtaccaattatttctattgttattggtgaaggtggaagtggcggtgcgttagctcttggccttggtaaccaaattttcatgttagagaatgctgttttctctgttatttcaccagaaggcgccgcagcaattttatggaaagatgcaagtctagccaaaaaagcagcggagtctatgcgaatcacagcaggagatttatacgaactaggtattactgatgggattattcctgaagtaaaaggcggtgctcatcgcgatttagcagcacaagcagaagaaattaataaaactatcacgaaatcccttcatgcattaatggccttttctgaagagcaactaattgagcaacgttacgataaattcaaaaaaatcggcgtttacgaaactttataaagtccaaaagaagatgattctcttatttttaaggaatcatcttctttttatatagtaatgtagaaaagaaagtttataagttcacaagtatagaccaattaaagtgttatttaggtagaaagccattttgcgggtgaaatggaatagaccgatatgaaaaagcgcatgtgcaagcggttacgctttaaaaaagtgttctgttggagcttttcatttgaccttttttcatgtagaataaacacatgtgatgaaaaacaatatcattgtctgaggtggtaagtaaaatgaaacgaattgcgattttaacaagtggaggagacgctccaggaatgaatgcagccactcgcgctgttgtacggaaagcaatctatgaaggacttgaagtttacggtattaactatggctttttagggctagtcaatggcgatattcgtaaattagaattaggttcagttggtgatttacttcaccgtgggggaactttcctctattctgcaagatatcctgaattcgctacagaagaaggacaacttaaaggaattgaacaattgaaaaaacatcaaatcgatggcttagttgttatcggtggagatggttcttatcacggcgcggaagcacttacaaaacgtggattcccaactattggtatcccaggaacaattgataatgatatttctggaactgattttactattggttttgatacagcgctaaacactgtgcttgatgcacttgataaaatccgcgatacagcgacaagtcatgaacgtactttcattattgaagttatgggtcgtgacgcaggtgatatcgcactttggtctggccttgctggtggcgctgaagctatcatcgttccagaagaaagctttaacatggacgatgttgtggatcgtttaaacaaaggtcgcgaacgtggtaaaaaacatagtattattgtagttgctgaaggagttatgtctggtaacgagtttgccaaacaactagctgaatatggcgattatcatgcacgtgtaactgttcttggacatgttcaacgtggtggtagcccaactgcatttgaccgtgtacttgcaagtcgtcttggtgcgcgctcagtagaattattgctagaaaaccgcggaggattagctgttggaatccgtgaaaatagaattgtcgaaaataatattggtgaaattttaaaagaaaaacacactcttgatcaaaaattatttgatcttgcatctattttgtcgatttaaaacggctgaagagctggctgccatgacaaagcatggtagcctttctttgtgaaaaattttagtaacgtataaaaatagactttgagaaaaaagagaagtcaattgttaatcaagcatgctgtaacaatctggaaaacgttttcttgttatcgttaccatgcttcacaattgcgctcttattcacaaacttacttgttttgcaaggttgtgactggtaaaataggtaatatatgtttataatgaatacgaatgaatagctaagttctaggaggagtaataacatgaaaaaaacgaaaattgtttgtacaattggtcctgcaagtgagtcagttgacacattagttcagttgatcgaagcaggaatgaacgttgcacgtcttaatttctctcacggagattttgaagagcacggtgcgcgtattgtaaatatccgtgaagcatcgaaaaaaactggcaaacaagttgctatcttacttgatacaaaaggtccagaaatccgtacaaacgacatggtcggcggaaaattagaattccaaacaggtgacgttgtacgtgtatctatgactcctgttgaaggaacaaaagaaaaattctctgtaacttacggagaactttatgatgacgtagaaattggttcttccattttacttgatgacggtttaatcggtcttgaagtaatcgaaaaagacgaagctaatcgcgaactagtaactaaagtacttaacccaggtgtacttaaaaataaaaaaggtgttaacgtaccgaatgtttctatcaacctaccaggaatcacagaaaaagatgctgctgatatccgcttcggtttagaacaaggtattgactttatcgctgcatctttcgtacgtcgtgctacagatgttcttgaaattactaaaattttagaagagcataacgcaactcacgtacaaatcattcctaaaatcgaaaaccaagaaggcgttgacaacatcgacgaaatcttacaagtatctcaaggcttaatggttgctcgtggtgacctaggtgttgaaattccagctgaagaagttccgattgtacaaaaagaacttatcagaaaatgtaataaacttggtaaacctgttattactgctacacaaatgcttgattccatgcaacgtaacccacgtccaactcgcgctgaagcaagtgacgtagcgaatgcgatttttgatggaacagatgctattatgttatccggtgaaacagctgctggggattatccagtagaagcagttaaaatgatggcgaaaatcgctgttcgtactgaggaagttctagttgctcaagataaatttgcacttaaacttcatgaaaatacagatatgacagaagctatcggtcaagcagttggccatactgcgaaaaacctaaatgtacaaactatcgttgctgcgactcaaagtggtcacacagctcgtatgatttctaaataccgtccaaaatctcatatcgttgctgtaacattcaacgaacatgtatatcgcggattagctctttcttggggcgtatatcctcgtctagctactccagttagcaatacagacgaaatgtttgaccttgcagtaaaagaatctcttgcttcaggtgttgcgaaacaaggcgacctaatcatcatcactgctggtgttccagttacagaaagcggaacaacaaacgttatgaaaatccaattaattggtgaaaaagtagttaaaggccaaggtattggtagcaaatcagttattggtaaagcagtagttgctaaatccaatgcagaagctcttcaaaaagcagaagaaggcggaatcttaatcgttaaaacaactgataaagaaatccttcctgcattcgagaaaagtgctgcagttgttgtggaagaaggcggcttaactagccatgcagcagttgttggaatcaaccttggcattcctgtcatcgttggcgctaaagacgcaacatcccttgtaaaagacggtgaaatcatcactgttgattctcgtcaaggtgttgtatataacggcaaaacagcaactcactaaaattaacctttctaaaaagcgtcccgctagcggggcgctttttttgtgtctacgcttgtattgtttttcgattgcgccaaaataggttataatagtcattaagtattggagttgattttatgagaaaatttattctttattgggctttatatggcttaatagaattgattatgtatgtttggctattccaagtaatcggtttttggccacttctttttattcaaatagcttcgagcgcctttggtatttttattttcaaacgccttggaggcaaccttttccggaatttacgtgatggacgaacagtagcaccatatttattagatagcctatgcttttttatcgcgggtttcctattaattattccaggagttattaccactattttagggctagttatttttatcccgttttctcgtaaactattaaaacctaaattaacgaaatggcttggaaaccaaaagaaacacacacaatattattattttgatatgtaattgaaacctctatgggaaaaaactttctatagaggtttagttgaaaaaagggtaattcattttccttatggcattttagtattactataaggtatgtttatgatataataattgttatctcgcttcctagatgcgtgatattgaaaggtgacttagtatgtttacggaaagtatgttgtttttacttctttttttacttcttggacttatagcaaaaaataattcgcttattattgcggtagctgtcgttattttattgaagttatttcacgtcgatggtaaagcaatggaactgattcaagctaaaggaattaattggggcgtaacgattattactgttgctatcttaattccaattgcgactggtcaaatcggttttaaagatttaattgattcttttaaatcagcagctggctggattggtcttggggcaggaattgctgtttctattttagcgaaaaagggtgtaggctatatggccgttgatccacaagtaactgtttcacttgtatttggaacgattttagcagtagtactgtttagagggattgctgctggaccggtaattgcagcgggtattgcgtatatggcaatgcagttagttgcattcataaaataaatacataagtaaaaaaggataaaaggaggaaacgaaatgacgttatctaaagggttggaaaatgtatatgttgctgagacttccattagttctattattgatgatatgttaacgtacgttggttacggtattgatgatttgatggaaaataatgcttcttttgaagaagtgatttacttattatggcatttacgtttgccaaataaagaagaatttaaaaagtttaaattagaaatccaagaaaatatggcagtatctgaaaccattattacaagtttaagaatgcaaaatcatcaaaaattgcatccaatgagcgttttaagaacaacggtatcgatgttaggtgtgtttgacaccgaagcagaattagatgatggggaagctgtgtaccgaaaagggctacgtcttcaagcgaaaatgccaacgattgttgctgctttttcaagaattcgtcgcggacttgatcccattccgccaagagaagatttaaatatggcagcaaatttcctttatatgattacaggggaagaagcggatgagttatcggtagaagcaatgaacaaagcgctagtactgcacgcagaccatgagtttaatgcatctacatttacagctcgagtttgtgtggcaacgctttcggacgtttattctggtgtaacatctgctattggtgcgctaaaaggcccacttcatggtggtgcgaacgaacgtgtatttgatatgttagaagaaatcgatgcagctggcgatgtacgtaattatatccaagaaaaaatcgatactaaacaaaaaatcatgggctttggtcaccgagtttatcgaggtggggatccgcgtgctaaacatttacgtgaaatgtctagaaaattaactgctgaaaaaggcgaagaaaaatggtttgatatttcactgcaagtagaagaagctgtttgggaattaaaacatttaaaacctaatgttgacttttattcagcttccgtttaccacgcgcttgggattgaccgcgatttattcacgctagtattttctgttagccgtgtttctggttggttagcacacatttttgaacaatatcgtgataatcgtcttattcgtccacgtgctatctacgttggacctgaaaatagaagttatttacctgtagaagaacgaatttaatggaggaggaacaagttttatgagtcaaaaaattcaagtagaaaatggtgttttaaaaacaccgaacaacccagtcattccttttattgaaggagatggaacaggtccagacatctgggcagctgcaaaacgcgttttagatgcggcagtaaaaaaagcttacaatggcgaaaaagaaattgcttggaaagaagttctggctggcgaaaaagcatttaaacaaactggtgaatggcttccacaagagacactagatacaattgatgagtatttaattgctatcaaaggaccgcttacaacaccaattggtggcggtattcgctctctaaacgtcgctttacgccaagagttagatttatatgtatgtttacgtccagttcgttatttcaaaggtgttccttccccagtaaaacgtcctgaagatactgatatggtcattttccgtgaaaatacagaagatatttatgcgggaattgaatttaaagaaggtagcgcagaatcgaaaaaattaattgatttcttaaaatcggagtttggcgtggataaaattcgtttcccggaaacttctggtattgggattaaaccaatttcaaaagaaggaacagagcgtttagtccgttcagcgattgaatatgcgattaaagaaggacgtaaatctttaacacttgtacacaaaggaaatatcatgaaattcactgaaggagctttcaaaaactggggctatgatttatgtgaacgcgaatacggcgataaagtatttacttggaatgagtatgatcgtatcaaagaagcagaaggtacagaagctgctgatgcaaaacaaaaagaagagcttgctgctgggaaaatattagtaaaagattcgattgcagatattttcttacaacaaatcctcactcgcccagctgaatttgatgtagtagctacgatgaatttaaatggagattacatttctgatgcccttgctgctcaagtaggtggaattggaattgctcctggagcgaacattaattatttaactggtcatgcgatttttgaagcaacacatggtactgctccaaaatatgctggtcttgataaagtcaatccatcttctgttattttatctggaacattactacttgaacatattggctggggtgaagcagcagcactcattaaccactctatggaaaaaactatcgctgcaaaaaccgtaacatatgatttcgctagattaatggatggagctacagaagttaaatgttcggaatttgcggacgagttaatcaaaaacttctaaaataagtcgattttaaacgataaaactagttcgtaatatctttttataaaggaaatgtacgtattttaaacaaaccatttaatcccattcggataagtggtttgtttttatgttcctatggtaaaatagacacaagtgaatgataatatcgaggaggatatccctgtgaataaattagttttaattgatggaaatagtattgcgaatcgcgcgttttatgcgttgccgctcttaaataatgataaaggcgtatatacaaatgcggtgtacggatttgcaatgatgctgatgaacgtacttgaaaaagaaaagcctagtcatgtgctcgttgcttttgatgcaggaaaaacaaccttccgccacactacatttaaaggatataaaggtggtcgccaaaaaacgccaagtgaattatccgagcaatttccatttatccgagagctcttaacagcttacgatatcccgcaatatgaacttgctaactacgaggccgatgatattatcgggacgttaacgaaaaaagcagaagcagacggaatggaagtcgctatcataacaggagaccgcgatttaactcaacttgcttctcggaaaaccactgtttatattactaaaaaaggtatagctgatatggaaacaaacactccagaaaccttaaaagaaaaatatgacttaacaccatcgcaaatcattgatatgaaaggtttaatgggagattcatctgataatattcccggcattcctggcgtaggtgaaaaaacagccttgaaacttttgcatgaatttggcggtacagttgaaagtgtccttgaacatgctgaagaaatttcaggtaaaaaattaaaagaaaaagtactagaaaataaagaattagctattttaagtaaagaacttgcgacaatcaatgtagattcaccaattgaatgtacagtcgaaagtacgaaatatgatggctatcaaacagaaaaagtcatcccactattaaaagaaatgaacttcacaacgcttttaaaaaacatcgaaggagatacagcggaagaagcaaaagaattaaaagaactatcttttgaaatagtaacggaattaaaagaacaacactttggcgggaaaaccgcgctttatgtggaactggaaaatgataattatcataccgcaaactttattggattaaccgttcattctagccaagggacatacttctttacgaaggaaactgcagaaaaaagtgcggttttccgtaattgggtggaaagtgacgaaacaaaagtcgtttatgatgcgaaaaaaacaatggtagcgatgaaccgaattggttttgctataaaaggtgtcacttttgatattatgttagcttcttatttactaaatccatcagattccattgatgactttacaagtgttgctgtgagacatgattatacagaagtagaaacagacgaagcaatttatggaaaaggtgctaaacgaagcacgccggaagagaacattgttgctgcccacttagccagaaaagcagtagcaattgctgaattagagaaaagattagtagatgatttagaggaaaatgagcaattagctttgatggaagatttagagttaccactgacatttgtcttggcacaaatggaaatgcaaggggttagcgtagatacaaaacgcttagaaaatatgaaagtagaattagctggtagattgaaaacattagaagaatcgattcattcactagctggcgaagaatttaacatcaattcaccaaaacaattaggtgtcattttatttgaaaaactagaacttcctccagtgaaaaaaaccaagactggttattcaaccgcagcggatgtactagagagcttatcaggaaaacatgcgattattgatgaaattttattatatcgtcaacttggtaaaattcaatctacctacattgaaggcttgcttaaagtaactgacaaagaaacgcataaagtacacacgcgtttcaaccaaacgttaacgcaaactggtcgtttaagttctgttgatccgaacttacaaaacatcccgattcgacttgaagaaggccggaaaatcagacaagttttcgtaccaagtaaacctggttggaaaatgttttccgccgattactcccaagtagaattgcgtgttttagcgcatatttctgaagacgagaatttaatttatgcgtttaaacacgactatgatattcatacaaaaacagcgatggatgttttccatgtagaacaagatgaagttgattctttaatgcgtcgtcaagccaaagcagtaaactttggaatcgtatacggcattagtgattatgggctttctcaaaaccttggtatcacgagaaaagaagcgaaagactttattgatcgttattttgtgagttatccagctgtaaaagaatatatgcaagatattgttcgttttgcgaaagaaaaaggctacgtagaaactattttacatcgtcgtcggtatattccggaaatcgtcagccgcaatttcaatgtaagaggatttgcggaaagaacggcaatgaatacacctattcagggtagtgccgcggatattataaaaaaagcaatgattctcatgagcgaacgcttaaaatctgagaatttagaagcaaaattattacttcaagtgcacgatgagcttatctttgaagcacctgaagcagaaattgcaaaattagaagagattgtacctgatgtaatggaaaatgcggtagaactttctgtgccacttaaagttgatagcgcatttggcgacacttggtatgatgcgaaataaatagagaaacggggagtttatatatgccagaaatgccggaagtagaaaatgtccgcgcaacattacaagaattagtcccaggtaaaaaaatagatcaagtgattgtccgcgttcccaaaatgatagtagcaacaccacccgacgagtttgtccatatgcttgtcgggcaagaaatagaagcagtacgtcgtcgcggtaaatttttactatttgacttaacaaattgtacgattttatcccatttgcgtatggaaggtaaattccgtttaatggatgagaacgaggaagttactaagcacacgcatatcatttttcattttgaagatcatactgaattgcgctttttagatgtgcggaagtttgggacaatggaagtgacgaataaatacggcgagtcagaaacaaaatcgataaaaaaactaggtccagaacctttaacccctgcatttacattagctgattttgcaactggtgtgaaaaaaacgagtagagctatcaaaacagccttacttgatcaaaaattagttgctggtgttgggaatatttatgcggatgaaatttgttttgaagcaaaagtgcatccagagagagccgccaactcgctatctgataaagaaattaatcgcatatttgaagcgacaaaaagtatcatgactgaagcagttgcccttggtggttccactgttagaacttacgtgaattcacaaggtaaactaggacaatatcaagataaattaaaagtgtacggaaaaactggggaaccgtgcgttatttgcgggacacccattgaaaaaattaaactaaatggacgcgggacgcatttttgcccgcactgtcaaaaatagaaagcgagctgaaatcatgggtaaaacaattggattaacaggaagtgtggcaacaggaaagtcaactgtgagtaacctgattcagcaagctggaattccgctagttgatgctgatattgcagctagaaaagtagttgaaaaaggaacagatggcctagcggaaattgttgcatactttggaaaagacattttacttgaagacggtactttaaaccgggctaaattaggagaaattatttttcaagataaagaaaaacgggagaaattaaatgaaattacccatcctcgcgtgaaagactatatgttgaatgaaagagaacgcttttttgaagcaggagaaaaagttgtattttttgatattccgctactttttgaaagtcatttagaatctttagtggatcaaattatcgtggtttggacgacaccggaaacagagttaaagcgtttaatggaacgaaataacctaactaaagaagaggcattagcaagaattaatagccaaatgggaattgatgaaaaggcgaaaaaagccgattttgtgatagataataatgagtcacttgaaaaaacacaaaagcaagtccttacatttatcgagcgttttgttaataacaaatagccacccttactttcacatggtataatgaggcatacaaataaacagataaagaatgctagagataggagtgattttttgtgagatgtcctacttgtaaatataatggcacgcgtgttgtagactcaagaccggcagacgatggtaactccatccgaagaaggcgtgaatgtgaaaaatgcggattccgttttactacttttgaaaaggtagaagagagtcctttaatagttgtgaaaaaagacggggcaagagaagaatttgctcgtgaaaaagtaagacgtggtttaataagagcttgtgagaaacgcccagttagtgcggaacaaattgaagaaatcgtgaatgaagtagagcgcgaactaagaaacattggtgacagcgaaatcgcttctgatttaatcggtgaaaaagtaatgaataaattagcgagtcttgatgaagttgcctacgtgcgctttgcatcggtttatcgccaatttaaagatattagtgtgtttgtagaagaactaaaagatttgatggaaaaaaataaagataggtgagtaaattgacggaattttggatggagcttcaggcggtagatagctatcaagtgaaggcaagtgggattttgacaggtgccgatagaaaaataattacgatgttgtatcaaccgttaatgggggcagaatgtcttgctttataccaaaccctgttcacagaagtggaagaaaacagactttggtcagaagcgcattcgcacgtccaacttttaaatatgcttgatattagtttgaaagcgttattcgaggcgcgattgaaactagaaggcttaggtcttttaaaaagttatgtgaaaacagaaaatgaccaacgcttttatatttacgaaattttaccgccgttatcgcccgaaaagtttttttcagatggtcttttaaatatttatttatatagtaaaattggcaatgcgcagtttcagcgtttgcgtcgtttttttgcagatgaaacttttgaaacagatacatacagtgaaattactcgttcgttccaagatgtttttgagccgtttaaaggtggcagtagtgcagttccatcagaatctagccaggttttagtggataaaatcgtgccaaaagaaatcgaatttgatgacgcgagttttgactttaatttattcttaagtttactttcaccaggtatgattgccagggaaaaaataacaaaagaagtgcgccaaacgattttaaaattacacggaatttaccaagtttctgaaaaagatatgccgagttatttgtatcgtgcgcttgatgcaaatggcgagattgacatcgtttatttacgaaaaatcgttcgcgaaggctacacgattgaaaatggcgctccaccaaaattgcaaatgaagcaggaaacacctggaaaaaaagaaccagaagaagctttaaatgatgaagaagcccttcaagtttatttagagagcatcacgccattccaattattagtggatatttcagacggcgcgatcccggcagaaaccgatttacgcgttgtagaagaagtgatgaatcaacaaaatctaccggttcctgtgatgaatgtgctaattgaatatgtcttacttcgccttgaccggaagctttctaaaaattacatgatgactattgcggcccactggaaacgaaaaaatgtaaaaacggcaaaagaagctatggatctcgcgtggcaagagcacgaaaaatataaacgattacaagaagaaccagccacaccgaaaaataataattacaaccgaaattaccaaaaatccactagaaaagaaattttaccggattggtttgataaagaacaagttgctccagcagaaaacaagatgacagataaagaaaaacaaacgcttgaagaacaagttcgtgaaattaaagaacgactaaataaaaggtaggtgaagaatatggataacatcgaaagaacattaggacagctttttgaagggcgagattttgaaaaagaataccaaggtttaaaacaacaagttctccattatcaaccaattcaagattttttcaaggaaaataaagaagatattacggaacaattaattaatcaaaacttgtctaatttgtacgaatttatgacgcaacataaaaaattcacagagcaagaagagacattaatgcctggttatgctccaaaacttgtccttaacggggaattcattactgtcacctattatccaacaaaagaaaaaattgaagaagataaacgtcgtgctgtcgagcggagaattcgttcgctttacatgccaaaacaagtggtggatgctaatttagcagacttttatacggatgaagaatcgcgtaaattggcgcttgttgaagcttatcaatttttaaataactatccacctcaaaatggtgagcgtgtgaaggggttatttattcatggtagttttgggactggaaaatcctacttgcttggagcacttgcaaaagagttagctttaaaaggtatttcgacaactttagtttatttaccagaatttatgcgggaagtgaagcagtctatttcggataatactgttggcgaaaaaatccaatttgccaaagaaactgaagtattaatgcttgatgatattggcgcagaatcgatgacagcgtggacacgcgatgaagtgctgggtgcgattttacaattccggatgcaagaagaattaccaacattcttctcgtctaattacaatatggatcaacttgaaaatcatttaatgtttgctcaaaatggtacggaagaaaaactaaaagctcgccgaatcatggaacgggtgcgttatttatccaaagaagtaaacttagaaggaaaaaatcgccgcttctaaaaagtacttgcaaatatatctcatcgggcttataatgtgaagtaatataaaacaaagtgatgaaaaggacaaccaatttaacggaaaattatagagaggaagggctagctgggaaccttctattggaacttaaatttggaccaccttggaacttctattaggaacgttttttactagtaataatagacggatcgctccgttacaggcgacaagagtgaagtagttaattttagctatttctgaatcttgggtggaaccacgagcataaactcgtcccttgacaacaggagggatgggttttttattttgccctcctaaccacatttaaaaaaagaaaaggagagattagtatgaaaatcacatttccagatggcgctgtaaaagaatttgagccaggcgtgtcaacagccgacatcgcggcttccatcagtccaggtctaaaaaagaaagcactcgcaggtaaattaaacggagaattacttgacttagtaactccaatccatgaagatggggcaattgaaatcgttactccagaccatgaagatgcacttggtattttgcgccatagtactgctcatctaatggctcaagcgctaaaacgactttatccagatgtgaaatttggagttggtccagcgattgaatctggtttctactatgatattgatacagaagctgttattagtgatgaatctttagttgaaatcgaaaaagaaatgcaaaaaatcgttcgtgaaaatgtaccaatcgaacgcgaagttgtttctcgtgaagaagcaattaaacgttttgaagcgattggcgatcaatataaattagaactaatcgaagcaattcctgaagatgaaacagtgacaatttatactcaaggcgagtttttcgacctttgtcgcggtgtccatgttccttctactggtaaaattcaagtgtttaaactgttaagcgtggctggtgcatactggcgcggcgacagcaacaacaaaatgcttcaacgtatttacggcacagctttctttgacaaaaatggcttaaaagaatttatccaaatgcaaaaagaagcaaaagaacgtgaccatcgtaaattagggaaagaattagatttatttgcgaacagtatcgaagtcggtcaaggattacctctttggttaccaaaaggtgcaactatccgccgcgttattgaacgttacatcgtggataaagaagaacgcctaggttacaatcacgtttatactccaattatggcaaacgtggaactttacaaaacaagtggtcactgggatcactaccatgaagatatgttcccaactatgaaaatggataacgaagaacttgtgttacgcccaatgaactgcccacatcacatgatgatttataaaaatgacattcatagttatcgtgaactgccaatccgtattgcagaacttggcatgatgcaccgctatgaaatgagtggagcactttctggactacaacgtgttcgtggtatgactctaaatgatgcacatgtatttgttcgaccagatcaaattaaagatgaattcaaacgcgttgtggagctaattttagaagtatataaagactttgatattaaagattactccttccgcctaagctatcgcgatccgaaaaatactgaaaaatattttgacgatgatgcgatgtgggaaaaagcccaagcaatgcttaaatccgcaatggatgaaatgaatatggattactttgaagcagagggtgaagctgcgttttatggtccaaaactagatgttcaagtaaaaactgctataggaaaagaagaaactctttctactgtacaacttgacttcttacttccagaacgctttgatttaacttacatcggcgaagatggtgaaaaacatcgcccagtagttattcaccgcggtgttgtatcgacaatggaacgctttgttgcttacctaattgaagaatataagggtgctttcccaacttggttagctccagtacaaatggaacttatcccagttaacgcagatgcacatttagattatgcaaaaggagtccaagataaattacaacgcgctggacttcgcgcggaagtagatgaccgtaacgaaaaactaggatataaaatccgtgaagcgcaaactaagaaaatcccatacgcattagtgcttggggaccaagaagtagaagctggttctgtaaacgttcgtcgctacggctctaaggattcagaaacaatggatctagatgccttcattgcacaagtagtagcagaagtaagtaaatactaatctgaaaaatactgtctcaaatggggcagtattttttcatggtgcttttttcctctttttccgttatactagtaaaagataatgaatagaacaggatggacaattatggatgtaaataatgtagaactagtaataagcgctgttcgaccagagcaataccctgaaacagaccttccagaatatgcacttgcaggtcgatccaacgtcggaaagtcatcgtttattaatacgatgattcgccgtaaaagtatggcaagaatttcacaaaaaccaggaaaaacacaaacgctaaatttttataaaattgaagaagcacttttctttgtcgatgtaccaggctacggttttgccaaagtttcgaaaaccgaacgcgaaaaatggggcgtgatgattgaaacttatattacttctcgtgagcaacttcgtggtgttattcaaattgtagatttgcgtcataaacctacagaagacgaccgaatgatgtatgaatttctaaagtattatgatattcctgtcattgtcgtagcaacaaaagccgacaaaatcccacgcagcaaatggcaaaaaaatgctaaaattgttcgcgaaacactagattttgatcctgacgacaaatttgtcttattttcttctgaaacaaagatgggaaaagacgaagcatggcagtttatcaaagaaggaatggaataatagagagagttggaatgaaaaatccagctcttttttccgtctaaatacataaacggactatttggtgtccacatcgaaaagtggtagaatgtattagagttcaatttaattttaggaggattatcgaatgtttattctcaccatggggctgaatcatcacacagcaccaatcgacatccgcgaaaaattagtttttaaagaaacggaagaagaaatggccttagtaacattactgcaggaaaaaagtatcctcgaaaatgttattatttcgacatgcaatcgtacggagattgtggcagttgtcgatcaaatacatacaggcagatattacttaaaacgctttatggccaattggtttcaaatggatatggaaaaaatcgagccttatttgttttttcatgaagaagcagaggccgtcaatcatttatataaagtaactgcgggactcgattcacttgtactcggagaaacgcaaattctcggacaagtaaaacatgcattcgaaatcgcgaaacagactggaacaacaggcacactcttaaataaactttttcgggaagtagttacttttgcaaaaaaagtgcatcatcatacgaaaattaacgaaaatgccgtttcggtcagttatgcagctgtagaagttgccaaaaaactatatggttcattagataataaaaaaatcgtccttattggagcaggggaaatgagcgaacttgctttacaaaatcttgctggaagtggcattgcagatattactatcatcaatcgcacaaaatctaacgcagaaatattagcgcaccaatttcaagcaaaagttggtgcatatgaaaatatgtcggatcatttgttagaagcagatattgttctcgtctcaacaagtgctgaagagccgattattaaacaggtagctatgcaagaattgatggaacaaaaagcgagctctatgcttgtaattgacatcggcttaccaagaaatgttgaacatgattgttcatatattcccaatttccatttatatgatattgatgatttagctggagtggtaagtgctaactctttagaacgtcaaaggatcgttcaagaacttgaaaacaccattgagacagaagttcgaagcttttttgaatgggaaaaacaactcggcgtcgttcctgtcatccgagctttgcgcgaaaaagcgttagatatgcaagaagttactatgactagcttagaaaataaacttcctggattaacagaacgtgaatacatccaaatcgggaaacatatgaaaagtatcattaatcaaatgctaaaacaacctatctcagaattaaaggaaatgtctgtggaagaaaatgcagatacaagcattgaacattttaaacggatatttggtttaacggaaacagatgtagctataatagaaaaagaacaagctgaaacgaggagttaatgcatgaaacggaaaataattgttggttcaagacgtagtaaattagctttaacacagtctaactgggtgataaaaaaactcaaagaaaactatcctgaaatcgattttgaaataaaagaaattgttacaaagggcgaccgtattttagatgttactttgagtaaagtcggtggaaaaggtctatttgtttctgaagttgagcaagctttgagcgatgaagtaatagatttcgcggtacatagtatgaaagatgtgccttcaagtttgaaagatggactagtcattggagcaattccaaaacgtgaatccccattagattgttttgtttttaatgaggtaagcacgctagatgacttaccaaaaggtgcagtaatcggcacaagtagtctacgtcgcgcggcacaactcttaaaacatcgtcctgattttgtcgttaagccaattcgtggcaatattgatactcggcttcaaaaattacatgctgaaaactttgatgcaatcattttagcaaaagctggacttgcacgaatgggttggcttgaaaatacgagtttaaaactagaagatatatctcctgaattatgtttacctgctgtagggcaaggggctcttgctatcgaatgtagagaaaccgatcttcaaatttgcgatatgctagcttctattcaccatgaagaaacgggaatctgtgtagaagcagagcgcgttttcttgaaaaaactaaatggcggctgcgaaatcccaattgctggatttgcgacaaaaacaggcgattcagttcactttaaaggtttggttggtaacgcagatggttccattattcttgaatctgaacgaactggtgcgagcccagctgaaattggcaatcaagtagctgaagaattgctgagtgaaggtgcagataccattatcaaagagctgagaaatatatgattaaaaaaattgttttaacaagagaagcgagcaaaaataaaccatggcaagattatttttcgcaaaatggtttcgacgttgaatcaattccactaattgaaacggatcctaaaaaaattagtctgagtctaaatcaaaaagaggcagactggctttttttaacaagtgcgaatgcagtagaatatttcttcaatgaacaagctggtaaattaaattacaaaatagccgttattggagagaaaacaaaagaaaagttagcagaatatggatataagcctaattttgtaccgtccgtttaccaatcagaagtatttttgtctgagtggttaagtgaaaatactagccaaacaagtattttacttccacaaagcaacttaagtcgaacgataatagaagatacactgacgcaaaacggccacctagtttttccgattgaattatatgaaacaagcttcccagaaaattctcaaacaatattaatcgaacaattgcaactagatgaaaaacgaataattattttcgctagcccctctgcttggaagaacttttatacgattgcgaaacaattttctattaaaaatgaaaactggcgcattgcatcaatcggtaatataactaccgaagcaattttagcagatggttgggaagttacataccaaccaaaaaccttcaccatgaagcacttagctgatttgataatacaggaggaatttaaatgagtaatcaatttgatagacatcgtcgtttaagaaagacaaaaacaatgcgtgatttagtgagggaaacagttttacatacagatgatttaatctatccgatttttgtcaaagatggtacagaaccaaaaacagaagtagtttccatgccaggcgtttttcaatttcctctacatgaattagaagcggaaatgaacgctgttgcgagccttggaattaaagctgttattttatttggaatacctgctgaaaaagatgctgttggcacacaagcttatcatgaccatggcattatccaagaagcaactagattaataaaaagcaaatttcctgaaataattgtggtagcagatacatgtttatgtgaattcacagatcatggacattgtggtgtaatcgagaatggtcaaattctaaacgatgaatcactagaattactgaaacaaacagctgtcagtcaagctgctgcaggtgcggacatcattgcaccttcaaacatgatggatggttttgttcaagtaatcagagaaggccttgatgaagctgggttctacgatataccaattatgtcttatgcagtaaaatacgcttctgcattttatggacctttccgtgatgccgctggtagtgcaccgcaatttggagatagaaaatcctatcaaatggatccagcgaatcgcgaagaagcattacgggaggctcaatcggatgagcaagaaggcgcagactttctaatagtgaagccatctctttcgtaccttgatataatgcgagatgtaaagaatcatacgaatttacctgttgtagcctataatgttagcggtgaatatgcaatggtgaaagcagcagctcaaaatggttggattgatgaagagcgaattgttttagaaatgctgactagtatgaaacgagctggagcgacattaattattacttactttgcaaaagatgtagcaacatacttaaacaaataggaggcgggaattttgcaaaactatataaagtctgaaaaagcatttaaagaagcaaaaaaagttttacctggtggcgtaaacagcccagtacgcgcctttaactcagtcgatgcttcaccagtttttatggaccacgggaaaggtgcctatattactgacgtcgatggaaatgaatatattgattacgttttatcatggggaccacttattttaggacatgcggatccttctgttgttaatgcgataacaaactcagctatgaaaggaactagctttggtacacctacagaaattgagacagaacttgcaaaactcgtgattgagcgcgttccatctatcgaaatagtgcgtatggtttcttcgggaacagaagcaacaatgagcgctattcgtttagctcgtggatacacgaaaagagaaaaaatcttgaaatttgaaggaagttaccatggtcacggagattctttattaatcaaagctggttcaggggttgcaacattaggattacctgactcgcctggagttacaaaaggtcttgctgctgatacaattactgttccatacaatgatgtagaaggcgccaaactagcttttgaaaaatttggtgaagaaatagcagctgttatcgtggagccagttgcaggaaacatgggtgttgtccctccaattgatggtttcttagaaggattacgagaactaacaaccgaatacggtgcgctactaatttttgatgaagttatgacaggcttccgtgtggactattattctgcccaaggatactatgttgtaacccctgatattacttgtttaggaaaagtgattggtggtggactaccagttggtgcttatggtggtaaaaaagaaatcatggaacaaattgctccagccggctctatctaccaagctggtactttatcaggtaatccgttagcaatgaatgctggatttgaaacggttcgccaattaacaccacaacattatgatgtattccgttccctgattaagcgcatggaagaaggcttaaccgaaatttcaaatagacatgaagtaccactatcaataaacaaagcaggctcgatgttcggctttttcttcactgatcaaaaagtcactaactttgatactgctaaaacaagtgatttagaatttttcagaaactactaccgagaaatgttagcgcaaggtatttttctaccaccatctcagtttgaaggcgtttttatttctacaatgcatactgaaaaagaaattgatgcgactttagaagcttttgacgttacatgtaaaatgcttcgaggctaattgacgaatctacaaacatttgttaaaattatttttagtatatagaactaaatgcgatgaagaggaagagtaggtcatttatttttctaagagagaaagcggtcggtgtaagctttcaaaaataatgtctgaaggtagccttggagcagttttcctgaaataatagtagggaataaccggtagatctcgtctatcgttaacacaatgaagtgcctacatttcttattgtaggtaaaaaggtggtaccgcgaataatactcttttcgtccttttattaggatgagaagagttttttattttgcttaaaaaggagggatcgttatgacagaacaaaacgaaataaatatgcctaccaaatacgaacctagtaatgtagaggccgggaaatataaatggtggttagaaaaagagttttttaaagcagaaggtaatagtgataaaaagccttatagcattgtaatcccgccaccaaatgtaaccggaaaacttcatctggggcatgcttgggatacaacattacaagatataattactcgtatgaaaagaatgcaaggctttgatacactttatttaccagggatggaccatgccggtatagctacacaagcaaaagtagaagctaaattaaaagaagaaaatatttctcgttatgatttaggtcgagaaaaattcgttgataaaacatgggaatggaaagaagaatatgctgattttattcgagaacagtgggaaaaattaggtctaggtttagattattccagagaacgttttactttagatgccggcttatctgatgcagtaaaaaaagtatttgttacgctatacaataaagggcttatttatcgtggacagtacattataaactgggacccagaagcaaaaacagcattatcagatattgaagttattcataaagatatagaaggaagtttttatcatctaaaatatccacttactgatggatcaggatatttagaagttgcaacaaccagaccagaaacaattcctggagatactgcagttgctgtacatccaaaagatgaaagataccaacacttaattggtaaaacgattatgttgcctattttaaacagagaaattcccatcgttgctgatgaatacgtagaaagagaatttggttcaggagcagtgaaaatcactcccgcgcatgatccaaacgactttgaagtgggtaatcgtcatgatttaccaagaataattgtcatgcacgaagatggaacaatgaatgataatgctggtaaatatgatggtttagatcgttttgttgcaagaaaagctattattcaagactttaaagatttaggcttatttataaaacaagaacctcatcttcattcagtaggacattctgaaagaacaggtgctgtagtagaaccgtatctttcattgcaatggttcgttaaaatggaacctcttgcagctgaagcattagcacttcaaaaaacagaagacaaagtaaattttgtacctgctagatttgaaaaaacatatgaaacttggatggataatattcacgattggtgtatttctcgccaattatggtggggacatagaatccctgcttggtatcacaaagaaactggtgaaatctacgttggggagaatgagcctgaaaacctagatcaatgggagcaagatgaagatgttctggatacttggtttagttctgctttatggccattttctactatgggttggcctgacactgaaaatcctgattacaaacatttcttcccaactaatacattagtaactggttacgatatcatctttttctgggtatcaagaatgattttccaatctgttgaatttacaggagaaagaccttttaaagatactttaattcatggtttggtacgtgattcagaagggcgcaagatgtctaaatcacttggtaacggagtagatccaattgaagttattgataagtatggagccgattcattacgctacacacttgccactggttcctcacctggtcaagacttgaaatttagttttgaaaaagtagagtctacttggaatttcattaataagatttggaatgcatcacgatttgtattaatgaatcttgatggtatgaaatatgatgaaatcgacctatctaatgtgactgaagttagtgataagtggatcttaacaagactaaatgaaaccattcaagcagttacttctctaggtgaaaaatatgaatttggtgaagttggccgaactttgtataactttatttgggatgatttctgtgattggtatattgaaattgctaaaattccattatacggagaagatgaagttgctaaacaaactacaagatcagtacttgcatatactttaaatactacaatgcgattgctacatcctttcatgccatttgtaacagaagaaatttggcaaaacttgcctcatgaaggtgaatctatcaccatttccaactggcctgaagttaatgagcaacaaatggactcaaaagcatcaactgcaatgcgaacattagttgaagtaattcgagctgtacgaaatatccgtgcagaagtgaatacgcctcttagcaaatcaatcgtgctcgaaataaaaccaaaagatgaaacttataaagaaattttagaacaaaacatctcttatatagaacgtttttgtaatccagaaaaagttactattgcatttgacatcgagccttctaagactgcaatgacagctgttgtatctggcgctgaaatatttattccattagaggcattaattgatttagacttagaaatcgctcgccttgaaaaagaattggaaaaatggaataaagaagtagctagagttcaaggtaaactaaataacgaacgtttcattagtaaagctcctgaaaatgttgtagcagaagaacgtttaaaagaaaaagattatctagagaaaaaagcttcagttcttgaaaggattgaaacattgaaagaagtttaataaaatgatttgaccttatcataaaatcgtgtggtaaggtcattttttaaggtggttaaaaagatggcattaaaatcgtatcaggaagctttggattggattcatggaacgcttcgtttaggaataaaacccggcttagctcgaatggaatatataatggaaaagcttaaccatccggaaaaggctaataagtgggtacatatagctggcactaatgggaaagggtctactctaacatttattagaagtagtttagaagaagcaggatataaaacaggaacttttacttctccttatattgaaacttttaatgaacgaattagtgtaaatggtattcctgttagtgatcaaatgattgtagatttagcaaatagaataaaacctatagctgaagaacttgaaaaaactgtatacggtcccccatctgaatttgaaattattacagcaatgatgttcttgtgttttgcagaatatgagtcaatcgatattggcatcatagaagtcgggcttggaggaagactagattccacaaatgttttaacgcctttaatctctgtaattacaaccattgggatggatcatatggagtttttgggaaatagtatcgaacaaatagctggtgaaaaagcagggattataaaaccaggtatacctgttatttctggagttattcaaaaagaagcgcaagaagtaataataaataatgctgttagaaacaattcgaatgttgcatggctaaacaaagatttctgcattcaaaatagaggcgatgaaatcacatttagaacatcccatggagacgaaataccggacataaccattggcttgttaggaatacatcagttaaataatgcagcagttgcaataaaagtactacagtatctaaacacattttcatcctatgaaattaatcaatcagcaattaaacagggattaaagaaagctttttggccaggaagaatggaattgcttgatgtgaaaccatttattatgctggacggagcacacaatcctgaaggtgtaacaacctttgctaattcaataaaaacatatcctgggcataaaaaaataatagttagcatacttaaagataaaaattatcaagaaatgatagctttattaaagacaattcctgatactgaaattttattgacaacctttgattatcctcgggcaatgagtgattacgaagtcacacaaattggaactatagaaggtatttctactaatccaaactggaagcaagcattagatgatataaaggaaatcaaaaatgatactaagtttttcgttacaggctcgctttatttcatttctgaagtccgtaagtatttgcttacatcgcacaactaaatttttgaataaagtgagtatacttagaaaaataaaaaagcgcaaactactaaaatagtattttcgtatgctaaaagtaaataaaaacacctattttctcttagtagaaaataggtgttttttagttagtctacccagtgaaaacatcattttatcaatgtgcaaaaataaatcttctttgctattctgtttgtaacaactaggaggtggcggatggtttactttttactaataatctatagttctatttttatttcttttattcaagtcgcaggggaatgctttccaataaaaaaatcatttctatttcgtttttcagaatgtaatcattgtcaaaaaacgttatcgttctctcaaatgataccaatttattcattcctatttttaaaagggaaatctaaatgctgtcaaactcctattccgcttaactactttttattagaattaacgacaccaatttacatccttcttctgcattatcaattttctttttcttatcgttttgttataggctgtattatttattattttctcgcctttttcttcgtgacagatattttatatttgcatgttcctaattctgtaatgattctattctttttagtattgttgacatgttatatttcctttcaacaaccagctgtatctttaatctactctagtcttataagtaattgtttctacttactattttttattttatttcgaaaaggtattgggttaggcgacattaaaatacttattattttaagttcttttttaggttttgaaatgggatatattgtcttttttctctccattgttctaggtgcaatcatccttttaagtgctttagttttaaaaaaagtggagaaaaataaacaagtgccttttgtaccttacatttttatatcatttatcatagttagtattttaatgaaatgagggttgggatttatgctagtaaatgaaatctcggaaaatgagaagccacgagaaaaattacaaaattatgggatagaggcgctttcgacttcggagttagtggcattaattattgaaactggaacgaaaacggaatcagttttaacaattgctaatcgaattatgatgaaatttaaacatatagctgaaatgcagtacgcgtctattgaagaatttcaattagtgaatggaattggaattgctaaagcctcaaaaattatggcagcagtcgaacttggaaaacgcatcagtttagttacggaacaaaaagaaattgtcattagatgtccggaagatgccgtgaaactagtaatgcctgagttagctttcctttttcaagaacatttccactgtatttttttaaacaccaagaatcaagtgatttataggcaaacaatctttgtcggtggtttgaatgcttccattgttcatcctagagaagtttttagactggcattaagaaaatcatcagcttctataatgtgttttcataaccatccgtctggtgatcccgcgccttcaagcgaagatttacttgtgactaaacgtttagcggaggctggaaatattgttggaataacgcttttagaccacattattattgggaaaaacaaatacattagtttaaaagaaaaaggctacttttaaaccaaaaaagtgttcacaaattatctacagacagcatttatttccttgtgttaaagtgagtatcaattaaaaagcagaaggtgacttattatgctaaaacgatggaaagtatataaagataatattattgttttttctatagttgtggggatgtttattattccagtttttctttgtattatggaattttcaaaataaaaataattactttaaaaagtttaatttcgataaaattaaaaatgcaaaaaacatatttttaaagaaaagttaaaattttttccttctcatgaaaaattaatgtctgatactcttacttatgttataataagatggttgtttatgtgtctatacagaaacattgacataaagggataaggtaacattaatttaatggacgaataaggaaacttaatgtatcctgtagaatattacgaaggaaaaggagaatacagatgtttggatttggtaataaagatattggaattgacttaggaacagcgaacacacttgtctatatgaagggaaaaggtattgtccttcgtgagccttccgttgtggcaatgaaaaaagacacacaagaaatagttgcagttggtagcgatgcaaaaaatatgattggtagaacaccaggaaatattgttgctattcgaccaatgaaagatggcgttattgctgattatgatacaacagcagcaatgatgaaatattacatacaaaaagctggtaaaagtgttaatgctagcaaaccacgtgtaatgatatgtgtaccatcaggcattactggtgttgaaaaacgcgcagtgattgatgcaactcgtcaagcaggggctaaagatgccttcactattgaagaacctttcgctgcagctattggtgctggtcttcctgtaggggaaccaactggtagcatggtagttgatattggtggtggtacaacagaagtcgctgtaatttctctaggtggcatcgtaacaagccgctctgtaaggactgctggcgacgatttggatgaagttattattaattatatccgcaaaaaatataatttattaatcggtgatcgtactgcagaagcaattaaaatggaaatcggttcagctagtccaaaaggattggacttatctccatttagtattcgtggtcgtgatttagtaactggtcttccaaaaacaattgaagttactccggaagaaatcagtgaagcactttctgataccgttgcagcaattattgatgctgtaaaaggaacacttgaaaatacgccaccagaattatctgctgatattatggataaaggaattgtattaacaggtgggggcgcacttcttcgcaatttagatacagttatttctgaagaaacaaaaatgcctgtaattattgctgaagaaccacttgattgtgttgccattggtactggtaaagcgctagaaaacatggacatgtataaacgcaaaaaaatgaactaaatggacacactcatttatgtcatataacaagatgaattcgctgcaaaaaaatgaaaaaagagtactaacgagatgaggtgtcgttatgccacaattttttcttaataaacgtttgattatcttgttaatatccattattgttcttgtcgcgttagttggtttttctttacgcgatcgtgaaaatgcttcgtggccagaacaatttgtgaaagatgttgttggatttggcgagaatattgtagctaagcctacttcatttgtctcaggtgtgtttggtggagttgcagacttaaaaaacacatatactgaaaatcaacatctgaaagaacgtttagaagaattggcacaacttgaaagtgaagttgcagacttaaaaaaagaaaataaagatttaaaagaaagtctagatattactgatagtatccgggactatgatccactgaacgcctctgttatttctagaaatcctactaattggaatgatcaagttgagattgacaaaggctcaagcgatggagtaaaaccagatatggcagtaactacgccgagtggtcttattggtagggtgacaacaacaggtgcaaaatctgctacggttgaattgttaacttcatcggatgttaaaaatcgtgtttctgctaaagtacagggagacgaaaatgcatttggaattattaatggatatgacagtgatacgaagttgcttgaattaaaacaattaccttatgatatgaagtttaaaaaaggacaaaaagttgttacttctggactcggagggaaattcccggcaggtatttttattggtactattgaaaaagtagaaactgataagatgggattatctcagactgcgtttattaagccgggtgctgatatgtatgatctaaatcatgttactgttctaaagcgttcagctgaagcaggaacaacggcagatgatacatccagttcggacacgactggaggcaggtaaccatgaatgtaaagaaaaatattgcgcttcctgcaattatggtcggaacatttattttagaaggtgtcattagcctccagtttggtaatggtcttttcaatgataagcatctgtttattccacactttttacttgtaatgctaacaataatgacttgcttttataaacgtaatactactttagtatatgcttttatattagggttattgtttgatatttattatacaggtgtcatggggatttattttgcaatctttccgtttacggtttacattaccgataaatttatgaaagttttacagaataatatcttcttggtaggtttaatcactgtatttaatattatccttactgagagtttggtatatgctttttattatttaattggttcgaccacaatgaccattccggtatttattgatcagcgtctttggacaacgattttgtttaatctagcattctttttagttatctttttcccattccgattattccttgatcgtttggttaaatcagaataactatagtaattttatcagtttgaattcgctattacttgtaaaagtatgactgtggagtatatccacagtttgcgatttcaagctgtttttttcagaaaaagtatttttttattatcatttaatttgagttagtgtatactaaagtctagagtataaatgttgcggggtgaaatggtatatgaagaagaatgttcaaattaaaggcacaaaaagtggcatcagtatttttcttagtgataaggcaagtatatcggagctgcaacaagaattatcgcaattactagcagatcaaaagcaaaacccatactctggtgaaaaattagaggtacaagttcaaattgggaatcgactgttttcagaggaagaagaacgcgaaatttcaactattattcataacaatagtcaaatgaagattagcgcattttatagtaatgttatgtctaaagatgaggctaaaaaatggaaggaaaatgatcaaattttttccatggcaacgattattcgttctggacaagttgttcaagttcctggagatttcttgttaattggcgatgtgaatcctggtggacaaattcgttctaatggaaatgtatttgttcttggtaatattaagggaatcattcatgctggttttgaaggcgatgaaaatgctgttgttgctgggaaatttctttatccgtcacaagttagaatagctggcaaagtgtatggatttgatagtgaagattataaagaagttgcggatacagatttattttctgcgtttgtaaatgacgcgggtgaaatagtaattgatgaaatacataagataagaaaaattagaccggaaatttctaattttcaaggagggcgttaaacatgggagaagctatagtcattacttctgggaaaggtggagtaggaaaaactacttcaactgctaacttaggaacggcacttgctcttcaaggtaagaaagtgtgcttgattgatatggatatcggtcttcgtaatttagatgttgttctaggccttgaaaatcggattatttatgatttagtagatgttgttgaaggacgctgcaaaatccatcaagctatgattaaagataagcgttttgatgatttacttttcttacttccagcagcacaaactacggataaaaatgctgtttcgggagaacaaatgatagagctaattaatcaactacgtcctgattacgattatattctaattgattgcccagcaggaattgaaacaggatataaaaatgcggttgctggagctgataaagcaattgttgtgactactccagagatttcagctgttcgagatgcggacagaattattggcttgcttgaaaaagaagatattgagccaccaaaacttattatcaatcgtattcgtacacaaatgatggtaaatggagatgtgatggacatcgatgaaatcactacgcatttatctattgaattacttggtataattattgatgatgatgaagttattcgttcatctaatagcggagatccggttgcgatgttaccgaataatcgcgcctctcaaggataccgcaatattgcacgacgtattcttggtgaatctattccattaatgtcgattgaagcgaaaaaaccaggatttttcacgcgcttaaaacaactttttggcggaaaataaaaaattagaccctttatcttttggatgaagggtctttataaaaggtgattggatgaaaaaactagtaataaatgcagctaacatagaaaaacgtgtagcagtactagaagacgacgtgctaattgatgttgaaattattcgcccatctaacaaaattcaagtaggtgacattttttatggctttattcaaaaaatagaccgaaaaatggacgcagcttttgttgatttaggtaatcaaaataaaggttttatacatttaaaagatattccagctagctatgaaaaaacacaaggcgcaaaaatacctgttcaaattgttcgagaaggcagtgctacaaaacttccacttttatcagctgttcttgaattttcaggagatttgctgatttatttgcacggaaaagaatatatttccatttccaaaagaattcaggataaagaacctctgaaaataataatggagtcgcttttagaagagaatgaagcaataattattcgctctagcgcagaaactgcaacgaaagagcaattagaattagcattaaaccaagcaagagaaaaatatcaaacattagttaaagaagccgaaacaagaaagaaacctggcttgcttttatctgctgcttcaggcgttttcttgagtacgaagcaatttatccagcgctatatgccaatagaaattattactgatgattttgaatttgcgaagatagtggaagctaattttactgataaagaagttagtttaaagaaaagtgcggacttatttgctgatttaggtattaagcaacagatggatcgtcttagcagacccgtcgttcatctttcaaatggatcttctctttttattgaaaaaacagaagctatgtgggtagtggacgtgaattctagtcgttttaaaggtacaagtgctaaagaaaaaacggtagaagctgttaatataaaagcggttcccgagatttttaggcaaattcgtcttcggaatatgagtgggatgattcttgttgattttattggtggtatgtcagaggaggggcaaggagagctgcgtgaggcgatagagaaagaaagtcttgaagaatacattacgacacaagtggccgctttaacgcagtcagggctcttgcagctaacgagacgaaagaaacaacaatcctttttagaggtgacaacaattccttgtccggtttgttacgggacaggacacgttgcttcaaaagatacacttgcttttcaactagaaagagaattaagtgggattatgatgggagatccaagtagcatccaagtcatcaccacagaggatgtgttagatgcgttcttagatttgaatacctttaataacgctccaattgattgggaagtggcagacgaacgagttccattttatcaaattgctcgtgttgaaaattaaaattaacaagtgattgacatagacagcttctctatgctatcattttactgttatgtttgtagcgcaccaagctacaaccgcacagagctgggttaagtatttaccttgtgtaagtcccctgtaatggcgagtcttagtatatgaggaggtgcaagtatgtacgcaattattgaaacaggtgggaaacaaatcaaagtagaagcaggccaagaaatctatgttgagaaattagcaggtgaagttggtgatgttgttacttttgacaaagttctattcgtaggcggagattccgctaaagttggcgttccattcgtggacggagcaactgtaacagctaaagttgaaaaacaaggccgtgcgaagaaattgacagtttataaatataaaccgaaaaagaactaccacaaaaaacaaggtcatcgtcaaccttacacaaaattaactattgatgcaatcaatgcttaatttgaaaggacgaaaaaaatgattcaagtcgatgttatgcgagaaaacaaccaaatagtttcttttacaatgagtggacatgccgattttgccgaacatggcagtgatttggtttgtgcaggagcttcgtcaattgcctttgggatggttaatgctatttcagaagtacgtgactttgagcctgtgtttgaagagtcggagggttacctttactattctgtgcctgctgattttgttggagatgatgtggtacaaatcttgcttacagggatggaaaatcaactaaggtcattagcgtacagctatcctgatcatataaaaattaactccaaataggaggtggaatttcatgttaaaatttgatattcaacattttgcgcacaaaaagggtggcggttcgacttctaacggacgtgactctgaatcaaaacgtttaggtgcaaaacgtgcggacggacaatttgttactggtggatctatcctttaccgtcaacgtggtactaaaatctatccaggaactaacgttggtcgtggcggcgatgatactctattcgctaaaactgacggcgttgtacgtttcgaacgtatgggacgcgacaagaaaaaagttagcgtttatcctgaagtacaagaagcttaaatacaaaattaaaaaccgtcacttgtggcggtttttttgtgttttcttctttgtgaattaatttcttttaaaaagggttataactctcctaaattggggtaaaagtaaagaggcagatgaagagacattgtgaaaaataggacaagtcgtttgattgacagcgttttcttgatgtgattaaatagactcaagttaattaacatgtcaggagaagagatgacaatcgaaacgatgcaagggtactagtgtgcctacgttttgattgtcattctttttttgaagttaattgataatcggaatgtaaggggactagtaagtgttaaaattccggtgctacaaataagcaagaagaaggagttggaaaagatgattgacacaagtttagcaacacaatttctaggtgaagtaattggtactgccatcctaattattttaggtgctggtgtcgtagcgggtgtttcactgaagaaatccaaggcagagaatggcggctgggtcgttgttactttagcttgggggctaggtgttacaatgggtgtatatgtttcaggatatatgagtatggcccatcttaacccggctgtaacaatcggtatggcgcttgcaggtgctttcccgtggaactatgtattgccgtatattgttgctcagtttatcggagcattcattggggcaacactcgtatggttacattactacccgcactggaagaaaacagaagataaaccaacaaaactaggtgtttttgcaacggcgccagctattcgccattttacatctaacttttttggtgaagcattaggtacttttatgttagtgtttggattactatcactaggtgcaaattccttttcagacggattaaatccacttgttgttggcgcattaatcgtagctatcgggatgtctcttggtggaactactggttatgcaatcaacccagcacgtgaccttggaccaagaattgcgcattttgtttggccgatttctggcaaaggtggatctgattggggttactcatgggttccggttattggaccaattatgggtggtgcattaggtgctttagggtataatgcaattattaatggcgaactaggaatgtggttctgggtgttcgcagtattatttgttttaattcttattttaacaatgcaactcgacaagaaaaaagatttagcataagctagaataataactagctctaaacgaaagtctctgggctttcgttgtacttaaaactagaggaggaattttacatggaaaagaaatatattttagcactggatcaaggaacaacaagttcaagagcgatgattattgacgaagaaggagaagttattggcgttgcgcaagaagaatttgatcaaatttttcctaagccaggttgggttgaacatagtgccaatgaaatctgggcttcgattttagcagtaattgcaggcgtattactcaaaacaaatatttcttctaaagaaattgctgggattggtattacaaaccaacgtgaaactactgttatttgggataaagaaagcggaaatccaatttataatgcgattgtttggcaatctcgtcaaactgaagatatttgtaagcaacttcgtaaagatggttacgaagatacgattagatcaaaaactggtcttttgattgatccatactttgcaggtacaaaagctcgctggattcttgatcatgtagatggcgcacaagaacgtgctgaaaaaggagaacttcttttcggtacaattgatacttggttagtttggaaattaactggtggtcgtgctcatattaccgattattccaatgcttcccggacacttctttataatatttatgatttagaatgggatgatgagcttctaaaaatgcttaatatcccaagagcaatgttacctgaagttcgtccttcctctgaagtatacgcggacacagtgccttatcacttctttggtgaagaagttcctgttgcaggtattgccggtgaccaacaagccgcattatttggtcaaggttgttttgaaaaaggtatggcgaaaaacacttacggaactggttgtttcttactaatgaacacaggcgaaaaagcagtacgttctgaaaatggactattaactacgctagcttggggactcgatggtaaagtggaatatgcgcttgaaggtagtattttcgttgctggttccgctattcagtggttacgtgatggcttacgtatggttcgtcaatcaagtgattctgaaaactatgcgagccggattgaatctagtgatggtgtatatgttgtaccagcattcgttggtttaggcgcaccttactgggattccgacgttcgtggtgctgtctttggattaactcgcggtactgaaaaagaacaatttatccgtgcgacattggaatctcttgcttatcaaactcgtgatgtactgtatgcaatggaacaagattctggtattagcttaaaaacgttacgtgtggatggcggggcttctgctaataacttcttaatgcaattccaatccgatattctaggagttcctgtagaacgtccagaaaacaaagaaacaactgttcttggagcagctttcttagcaggacttgcagtaggcgtttggaaagataaaaacgaaattaaaaaacattggaaactagacaaacgttttgaagtagaaatgaaagatgatcaaagagaagatttatatgaaggttggcataaagcagtcaaagctgcacaagctttcaaataattgttaaaagatgcgccaaatgtgtaaaagcatttggcgcatttttgtgatgtaaaacaaataaatatctggaaatagaaataaatatagtgacagatgtatagtttgttcgttataatgaaagataagacttttaaggaacgggagaatataaaaattatgtttgtagatcaggttaaaatatatgtaaaagctggtaatggtggggacggtatggtagcattccgtcgcgaaaaatttgtaccaaacggtggtcctgctggcggtgacggcggtaaaggagcagacgttgtattcgtagtagatgaaggtttgcgcacactagtagattttcgctttaaacgaatctttaaagcagaacacggcgaccatggcatgagtaaaagtatgcatggacgcggtgcagaagatttagttgtcaaagtaccacaaggaacgattgtgaaagatattgatactggagagattattgctgatttagtagcacatggtcagcgcgcagttattgcaaaagccggacgtggcggacgtggtaacaaacgttttgcaacaccagccaatccagctccagaactctctgaaaacggggagccagggcaagaacgaaatgtacaattagaacttaaagtattagcagatgttggtttagttggtttcccaagtgttggtaaatctaccttattatctgttgtatctgcagcaagaccaaaaatcgctgcttaccatttcacgacgattgttcctaatttaggaatggttgatgcgggagatggacgtagttttgttatggctgatttaccaggtctaattgaaggggctagccaaggtgttggtctaggacatcaattcctacgccatatcgaaagaactcgagttatcgtacatgtaattgatatgtctggttcagaaggtcgcgtaccttatgaagattatatggcaatcaataatgaactagaacaatataacttacgcttaatggaacgtccacaaatcatcgtagcgaacaaaatggatatgccagacgcggaagaaaatctaaaagagtttaaaactaaaatcgctgaagatattccggtattcccgatttccgcagtaacaaaaacgggtctacgtgaattacttcttgcaattgcagataaattagaaacaaccccagaattcccactcaatgaaattctggaacaagaagatgaagatacagttctttacaagtatgttgctgaagaacctgactttgaaattacaagagagccagatggtacattcgtacttagcggtgccaaaattgaacgcttattcactatgactaacttcgaacgtgatgcttctattagccgttttgcgcgtcaacttcgtgcaatgggtgttgatgaagcacttagaaaacgtggagctaaagacggagacattgttcgcttacttgattatgaatttgaatttatggattaaaaaaagtgctgcgccaatcaattggcgcacgcttttttcctagctacaataaaaaggagagttgaaaatgaaaattgcttatttaggcccagcagcatcttttactcatgcagcagcagcgaaagcttttccaaaagaagagatggttgctaaaagcactattcctgattgcattatggcaatcgaaaaagaagatgtggacgtggcggttgtcccaattgaaaatactattgaaggaagcgtcaatattacgctagactatttatttcatttttcaagtgtccctgttgtggcggaaattgttctaccgattgcgcaacatttaatggttcatccagctcataaagcaacttggaaatccgtgcaaaaagtaatgtctcatccgcaagcccttgcccagtgccatacgttccttcaggcagaactttacggggtagagcgtgaagtaacaccttcgacagcttatgcggcaaaatgggttagcaataatccaactgaacttgtagcagcaattgctcctcggatggcagccagtgagtatggactagaaatcgttcaagaaaatgcccaagatttagaattgaaccaaacgagattttttgttttaagtcgtaagccagtttccattttattaccaaaagaagaagaaaaaacttcgatttcggtcattttacctaacaatatgccgggagcgttacataaagtattgtctacatttgcttggcgcgacattgacttaagtaaaattgagtcgagaccacttaaaacgtcattaggagaatattttttcttaatagatgtgctttcagaaggtaaagaaacacttgtaacgaacgctcttgatgaaattaggcttttaggaggtaaggcgaacaaacttggaacttaccatgtgcatcgcttacaaactacttaaataatgagttatcgtattttattgcggtaactttttttatttgcgaatagttattttttacgttaaaatttgtaggagaaaagctttactaaaacttgaaggagtgaaacagatggcaggacattcaaaatggaacaatattcaaggtcgaaaaaatgcgcaagattccaagcgttctaaagtatttcaaaagttagcaagagaaattttcgttgcagcaaaaaaaggccctgatccgaatctgaacccgtcacttcgattagtaatggataaagcaaaagcagtcaatatgccgaatgacaacatcaaacgtgctatagataaagctgctggaaatactagcggcgaaaattatgatgaagtaacgtatgaaggatatgcgccaggtgggattgcagtgcttgtccatgcgcttacagataataaaaatcgtacaagtacaaatgtccgtgtggctttcaataagaacggtggtagcctcggggaaacgggaagtgtcagctatatgtttgatcgtaagggctacttagtcattctaagggaaggcttaaccgttgatgaagaggagtttatgctagaagcgattgaagctggggcagatgatgtagaggtaagtgatgacgtctttgaagtatttactgaacccggagcattttctgatgtcaaagatgcattacaacaagctggttatacttttgctacagcagaactttcgatgtttccaactgtctacaacgaaattgcagaaaacaaccaaacacaatttgataaaatgatggaagcattagaagatgacgatgatgtacaagaagtttatacaaacgctgagataaattaagtcaaaacaccccttttgtgcaatctgaatggggtgttttatatgaatcaagaggaggaaataaaaatgaaaccacgtaaagttatgatcattggggcaggtaatgtagggtcggctgcggctcacgcatttgttaaccaaaaatttgtagaggagttaatccttgttgatttaaataaagaacgtgtggaaggaaatcggaaagacttggcagatgcagctgcatttatgtctgggaaaatggatatttcagttcgtgaagcaagtgattgcgcagatgtcgatattgcagtaattacagtgacagcgggaccattaaaagaagggcaaacacgtttagacgaactaagaagcacatcaagaatagtagcgagtattgtcccagaaatgatgaaaggcgggtttaaggggattttcttaattgccacgaatccttgtgacatcattacgtatcaagtttggaaattatcaggactaccaagagagcaggtgcttggaactggagtttggcttgatacaacaagattacgccgtttattagcagagaaattagatattgctgctcaaagtatcgatgcatttattttaggcgaacacggcgattcacagtttcctgtctggtcacattcctcgatatacggtaaaccagtaaatgaatatagtatggaaaaactcggagaatcccttgatttaaaattaattggtgaaactgcccgtgatactggctttgaaatatatcatcaaaaaggctgcactgaatacgggattgctggaactattgtagagatttgccgtcatattttcagcggtagtcagcgtgctctaactgtttcttgtgttcttgacggcgaatatggtcaaactggtttagcaatcggcgttccggcagttttaagccaaaatggtgtaaaagaaattatttccttaaaattaaacgaacaagagcaacaagcatttgaccattcagctgctgtaatcaaggaaaatataaaatctatataagaagtcaataatattattatgtaaactaaaaaacgatttccttttatgaacaaaaactagtacagatgttcctttttatgctatcatataatgtatgacgtgaaacgaagagaggacgaataaattgtacgattacataaaaggaatagtaaaaacgattacaccagaatatattgttgtcgaaacaggacaaatcggctatcaaataattacaggaaacccattttcctttcaacgattagaaggtactgaagcgcaagtctttttgtatcaacatgttcgggaagacaacatttccttgtttggtttccagtcaacagaagaacgttatctgttcaaaaaattattaagcgtttcgggtattgggccaaaaagtgcgctagctattatagcttctggagatgtagtaccacttattactgcaatcgaatcagaagatgatgtttatttgactaaatttccaagtgtcggtaaaaaaacagcacgtcaaattatccttgatttaaaaggtaaactagcagatgtagttgcaagtgaaatcgtctataaagctgcagaaaacgatattgttactgggctttcaccgcaactagaagaagcagttttagcgctcgaagcacttggttacagtacgagagaactaaaaaaagttataccaaaaatggcaaaagaaaacgacttaacaagcgatgcatacatcaagctagcactgcgattaatgacaaaatagagaggagcttgtggcatggatgaacgaattatttcaagtgaaacggtagacgcagaagaagtatcttttgaaactagtttgcggccacagaccctttcacaatatattgggcaagacaaagtaaagaataacttaactgtctttattgaagctgccacactccgaaatgaagcgctggatcatgtgcttttatatggacctcctggactcggtaaaacaacccttgcgatggtcattgcttctgaaatggggagcgaaattaagacaacgagtggacctgcgattgaacgcccaggtgacttggcgactattttgacaagtttagaaccaggtgatgttttatttattgatgaaatccaccgtttatcgcgagcaattgaagaaattttatatccagcaatggaagattattgtttggatattgttattggaacaggacctaccgcgcgttctgttcgcttagatttgccgccatttacgctgattggagcgacaactcgggcgggacttttatcggcaccacttagagaccgctttggtgtaattgaccatttggaattttacacggaagagcagttaaccgaaattgtccttagaacgtctgggatattggatacgaaaatcgatgaccttggtgcacgtgaaattgcaagacgatctaggggaaccccgcggattgctaatcggctattgaaacgtgttcgtgactttgcgcaagttagagggaacggtacagttactgaaaaattggcaaaagaggcactgacactacttcaagtggatccaagaggacttgatacgattgaccaaaagctacttcatacaattattcaatcatttagaggtggtcctgttggtttagatacaatcgcagcaagcattggcgaagagcgcgaaaccattgaagatatgcaagaaccctatttactacaaatcggttttctacaaagaaccccgcgaggacgaatcgcgacggaaacagcatacaaccatttaggaataagttatgaaaaagaggtataaagaatgaaagtagaagatttcgattttgatttaccagaagaattaattgcgcaaaccccattacttgaccggacttcaagccgactaatggtacttgataaagaatcaggtgagataaaagatcaacattttactgatataattagttatttaaataaaggagatgcactagtattaaacgatacgcgtgttcttccagctaggcttcatggaattaaagatgaaactggcgctcatattgaagtattacttttaaaacaaaaagaaggcaatgcttgggaaactttagtaaaacctgcaaaaagaattcgtaaaggcgctactattacctttggggatggggcgttaaaagctacttgtttagaagaacttgagcacggcggtcgaattcttgaattttcttatgaaggtattttttatgaagtattggagcaacttggtgaaatgccactgcctccatacattaaagagcaacttgcagatcaagatcgttatcaaacagtttacgcgaaagaaaatggttctgctgctgcgccaactgccggacttcatttcaccgaagagttattagcgcaaattagtgctaaaggtgtagaaataatatttgtaactctgcatgttggccttggtacattccgcccagtagacgtggaagatactcaaaaccacaaaatgcattctgaattttatcgtttaaccgaagaatctgctgatcggattaataaaatcaaatcggctggtggaaaagtggttgcggtcggaacaacttccattcgtactttagaaacgattgcgagtcgtcatgatggaaaactaattgcagaatcaggttggacagatattttcatttctccaggatatgaattccaggcagtagatgcgttaattactaatttccatttaccaaaatcgacattgattatgcttgtatccgctttatctgatcgcactaaaatattagcagcctataaccatgcggtagaacaacaatatcgcttctttagttttggcgatgcaatgtttattcattaatttgcgaaaaaaataacagaaaagcttgttttcatcggtaattttcgttatgctagtgaatagagtaaattagaaagaggtaacacatgtctgccattcgttatgaactaataaaaacagataaacaaactggtgctcgtcttggtaaaattcatacaccacacggcacatttgatacacccatgtttatgccagttggaacacttgcaacggtaaaaacaatgtcgcccgaagaattaaaagcgatgggcgcaggtattattttaagtaacacctatcatttatggttacgtcccggagaagaattaattcgagaagcgggcgggctacataagtttatgaactgggaccaaccaatcttaacggattcaggcggttttcaggtgtttagtttgagtaaaatgcgtgatattaaagaagagggcgttcattttcgcaaccatttaaacggagataaacttttcttatcaccagaaaaagcaatccaaattcaaaatgcgcttggatcggacattatgatgagctttgatgaatgtccgccgtatccagcgtctcatgaatatatgaaaaaatcagtagaaagaacatcacgctgggctgaacgtggcttaaaagcacacgaaagaccagaagaccaaggtttatttggtatcgtccaaggtggagcttacgaagacttacgcgctcaaagtgctaaagatctggtatctctagacttccctggatactccattggtggattgtctgtcggtgaaccaaaagacgtgatgaatcgcgttttggaacacactacaccactattaccagctaataaaccgcgttatctaatgggcgtaggttcgcctgactcattaattgatggcgtaattcgaggagtggacatgtttgactgtgttcttcccacacgtattgcacgtaatggtacttgtatgacatctagtggtcgcttagttattaaaaacgctaagttcacacatgatttccgtcctatcgatgaaaattgtgattgttatacatgtaaaaattactcacgtgcatacattagacacttgattcgttgtgaagaaacatttggaattagacttacaacttatcataatcttcattttctgttaaacttaatgaagcaagtccgtagcgctattatggaagatcgtcttgctgattttagggaagaattttttgagcaatatggattcaatcgtcctgatgcaaaaaatttctaaatatatatatagtatcgaaaggagttggaaaatatgggtggcggtatcgtaacatttataccaattatcttgatgatcgttttgttttacttcttattaatcagacctcaacaaaaacgtcaaaaagaagtacaaaatatgcaaagtagtttagcaaaaggtgataaaattattactattggtggacttcacggtattgttgaagcaattgaagatggcacagtcattttgaaatgcggaaacagcaaattaacttttgaccgtaatgcaatcagaactgtacttgaaaaaggtaatacagtttctaatccagttgtagcagaaacaacttctgatgacactgaagttgtagaagacaacaaataatacttgaaataaaaatgccatttccctttaaacggtggagtggcattttttaaacataaaaatagagcttatactttccatttaagctttttttagataaaatgggaatatgcttattgtttaagaaaggggatgacttgatgacggatacattttcggcttggtatgaggatttagaaccagcgattttaattaaagtggaagattttcatattctaggctaccgagaaatcaaggctagtcacatttgggcgtttttaacagaggaaaagtggaagaataacccagccccagcattgcatgaaagaataaatgatgtcatgcaaatgaaaattggacaattaatgcagtttattatgacaacagctgaacaagaatctaataaccatgttgctcaagcggaaaattcgcttcaaccaaatgtggaagattaacagcctgctgacgaatacttaaatagtaagttaagtacataaaatcattaagtattagttgttagactgggatttgttatggtttagatgagggaggaacgaaacagaaatggtaaaaaagagtaagatagttattttctttctagtagttgcaattatcttcggtgctgtatttggtaccgcgaaaatggttatgcaaaatattaatcttggcttagatcttcaagggggatttgaagttctatatgaagtgtctccagctgatggtaaaggaactgtttctaagcaaacattaacagatacagttacttcacttgataaacgggtcaattcattaggtgttgcggaaccaagtattcaaatcgaaggaaataaccgcatccgtgtccaacttgctggggtaactgaccaagcagaagcacgaaaaatgttatcaactactgcccagttatcatttagagatgcaaatgacaaaatgatgatgaatggtagtgacttggttgcaggtggcgctaaacaagctttcgatgctagcaataatccgatcgttactttaaaactaaaaagcgcagataaatttgctagcgtaacaaaaactattctagcagaagcacctgacaatcaattagttatttggttagactggaaagaaggacaaaaatacaaaacagaacgtgaaaagaaaaatccagcttacttatctgcaccaaatgtaagtagtgttcttgatacagataaagtagaaatttccggaagctttacaactgaagaagcaaaagatttagctgaattgttaaactctggcgcacttcctgtaaaaatgactgaagtttactctacatctgttggcgcacagtttggtcaagatgcattacaagaaactattttagctggtattatcggcgttatggctatctttattttcatgatggctgtttaccgtctaccgggtgttatcgcatctattacattagttgcttacacttatttagttctattaatactaagcttactcaatgccacacttactttaccagggattgcaggcttgattctgggtataggtatggctgttgacgcaaacgttataacatacgagcgaataaaagaagaaatcaaggtcggaaggtcgacaaaagcagcatttgaagtcggtggaaaagaagcattccgtgcgattttagatggtaacttaacgacactgattgttgctgcagttcttttctacttcggtacaagctctatcaaagggtttgctacagttctaatcattagtattctagtcagcttcctaacagctgtttggggttcaagattcttactaggattactcgtgaaaagcaattggcttaacaacaaaccaggtttctttgcagttaaacgaaaagatattcataacttacatgaaggtattaacagctttagcttaaaaacgcactttgatcgttatgactttgtaaaacatcatcgtctatttttatctatatttgctgcaatagttatcgttggtattgttatactatccatctttaaattaaatcttggcattgactttgccagcgggactcgagcggaagttacagctaatcaaacattgactgagacgcaaattaagaaagatttagatgcgattgatatgccatcgaatgatattgtgttccaaggctcaggatcgaaaacagctgttgtgtcttacaaaggaacattatcgcaaaatgatgtagctaaatttaaagattactttgaagataagtataagcacgaaccaagcattagtacagtttccccgacagttgggaaagaacttgctaaaaatggcttctgggcccttggtgtggcttctgtcttaatcgtgttatatatcgctgttcgttttgaattctatatggggattgcagcgatactttcactgctattcgacgcctttattatcttcatcttctttagtgttacaagacttgaggttgacttaacatttattgcagcggttctgacggttatcggttattccataaatgatacgatagtcaccgccgaccggatacgagatattagcatgaagatgcaacgctttaaaacaaaagaagagattgcagatgctgttaataaagcattacgtcaaacattcactcgttccattaatacaattctaacagttatcttcactgtacttgcacttgtattatttggtagtgaatcaattcttaacttctccattgctttactagttggattggtttcaagtgtattctcatccatcttcatggcaatgcaattatggtacgtatttaaagcaagacagttacgtaaaaaaggtccgattagtacggttaaaaagaaaaaaccacgtaataatggtcaacctgtagtttaaaaaaacagccgaatttcataaaatgaagttcggctgtttttaatagacttgaaacgggtaaataataagataattgttgcgaggaggagagagaggatgaaagaaaacaaagttcaatggcaagtgattgtggggattattctagcacttattattgcgatatttgcagttattaatgtagacccagttgaagtcaactttttatttgctcaagctgagtggccgttaattttaattattataggttctgtactagttggttgtttaattatctttttcttaaacattgccaaatcacgtggcatgaagaaaagagtaaagcaattaactgctgaaaaaacagagctagaacgtcaattagcagctgcaaaatcgatgaaaacacattcatctaatgtagaaaaacgcgatgctgaaaatacagtagagccaattaaataataaagaagacgctaacttacttagttagcgtttttgtttggaagattcctcttggtttttctagcaattttagatataataggaaggttgagaggtggggtaaagtgattcattcaaaatacttatggaatatcgaggaagcaagcgacgagaaagctagccaactagccgaacaattaaaaatctcgcttccacttgcaaaattgctttggaaaagaaaaattacaacgcaaggacaattcgataaatttttccacccagagaaatatgaaagttacgacccatttttacttgcagaaatggaccttgctgttgctcgaattaaacaagcaattgacttaaatgagcagattttagtctacggagattatgatgctgatggtgtgacaagtattgctgttttaatgaagacactacgacatttaggagcaaatgccgaattttatattccaaatcgttttacagaaggatatggaccaaatattgcagcatttgatatggcgaaaaaccaaggtgttgatctcatcattacggtggataacggaattgccgcactagaagtgatgacgcatgcgaaggaaatcgggctagatgtcattgttacggatcaccatgaaccgcgtgaagtcatgccagatgctattgcagtaattcatccaaagcatcctaaatctgcgtatccatttgatgaacttgctggagtcggtgttgcttataaattatctcatgcccttcttggtgaggaaccgaaagaattactggatctagtagcagttgggacagtagcggatttagtttctttaacggatgaaaaccgacttttagttcaattagggttacgccaattacgtgaaaatgctaacttaggacttgctgttttagcgaaaaaagcaagtttgaaattagaagaagctacagaagaaacaatcggatttggacttgcgccacgacttaatgctgtcggccggcttggtcctgctgatcctgccgcggatttacttttaaccgaggacccagaagaagcacttttcttagcggaagagattgatgatgctaataaagaacggaaacaagtggtcgtagatgtgacgaaattagcgatggctgcaatcgaggcaaaagaatccctcggaaatatcattgttgtctccggagaaggctggaatactggtattttagggattgtcgcttcaaaattagtcagtgtttattctcgaccggctatcgtacttggcattgatccagtgactggtgtagcaaaaggatcaggacgtagtgtagaagcttttcacttgtatcaagcgttagataagcatcgttcattaatgacagctttcggtggccatccaatggctgcgggtcttactttaccagcagaaaacttagctgaacttgataacaagctacaagaagaagctagtcacctttccgatgaagatttccgaccggctttgaaaatagaagaaaaaataaaccttgcagatatttccgtttcttttatagcgcaattagaaaaattagcgccgtttggaatggataatccaaaaccaattttccttttagaagagatgaatttaaaaggtactaaaagaattggggcagataaaacccatttaaaaacgatgcttgcaaatgaagatagtgatgtaactttagatgctattggttttggtgtaggagacttagtggagaaaatatcgcctcatgcagcagtagatgttgtcggtgagctgtctattaatgagtggaataatattaaaaagccacaacttcgaatgatggatattcacatcccgcactggcaactttttgatgtgcggaataaagctgaatggtctagaattttacaagaacgaaatgagcagcgactttttgtttgctttgaagaaagaacagttacaaccctcgcggaccaaaaatatatattagtcgatgaaacgaaaggttttacagcagattttcaaactgaggaattagtttttgctgatatgccggcgaaagtagagctaatagaagaaattgtgcgcgaaacaaaaccagagcgaatctttgttcattttgatgcttctgaaggtaatcaaatcccagcaatacctgaccggggagcatttgctgaactatatagcttaataaaaaaattccaaccatttccaatcgaaaaatacactcctaggcttatacaaaagtttggctggaacaaagaacaaatagatttcatgtcaaaggtgttttttgatttagaatttgctaaaatggatagtggtcagattattattaaccaagttgttgaaaaacgtaatttggacgaatccatagtttatcaacaaaaggtagaagaaataactactagaaaaaaactgttatactccaattatactgagcttcatagttggatgaaatcaatgatggaaacatcaatttacccgaatgcggaggaactagaaaatggaaattaaagatttacaagattacgtagcgattgtgaacgattggccgaaaaaaggtattgtttttaaagacattacgccacttatgaatgacggcgaggcatatcgttttgctacggataaaatcgtggaatatgcaaaagaattaaaaatcgatattattgtaggaccggaagcacgtggctttattattggttgtcctgtggcttatgcgcttggaataggttttgctccagttcgtaaaccaggtaaacttccacgtgaaacgattgaaatggaatatgatttagaatatggaacaaataaattatccatgcatagtgatgccatcaaacctggtcaacgcgttttaatcacagatgatttactagcaactggtggaacgattgaagctacaatcaaactagtagaagaactaggtggtattgttgctggctgtgctttcctaatcgaactaaaagaattagaaggacataaaaaattaaatggttacgatcgtttaatcctgatgaaattataaaaaacgaactactcctgatattttaggagtagtttttttcataaaaatctctaaaccactagaaaatgtggaaaaacaaggaaaagtgctttataaacaaacaagcggcatgctataatattatacaagaatctttttaggaacactcagttattgggtgtttttaagttggatatatgacaaagaaataagagggtgaatgtaaatggcgaaagaacaaaatctgacagctgagcaagtcatcgatatggcttctcattatatgaatcaggaacatcttgcgcttgtaaaaaaagcgtatgaatttgcgcgcgattctcataaagaacaatttcgtaaatcaggtgagccgtatattattcatccaattcaagtcgctggtattttagtagaactgaaaatggatccatcgactgttgcttcagggtttctacatgatgtcgtagaagatacacccgttacactagctgatttagaagaagtttttggcgaggaagttgccatgctagtggatggcgttacaaaactaggtaaaattaaatataaatcgcatgaagagcaacaagctgaaaaccaccggaaaatgtttattgcaatggcgcaagatattcgtgtcattttaataaaacttgccgatcgattacacaatatgcgtaccttaaaacatttaccagtcgagaagcaacgtagaattgcgaatgaaaccttagaaatattcgctccactagcgcatcgtttagggatttcacgagttaaatgggaattagaagataccgcgttacgttatttaaatccacaacaatattaccgtattgtccatttaatgaagcaaaaaagagatgctagagagcgctatttgcatgatgttatagacggggtaaatgaaaacctggacgaattaaatattcaagctgatatttcaggaagaccgaaacatatctattctatttaccggaaaatgtcggagcaaaataagcaatttaacgaaatttatgatttgcttgcagtccgcattgttgttagtagtattaaagattgttatgctgtgcttgggattattcatacgcgctggaaaccgatgccaggtcgttttaaagactatattgcaatgccaaaatctaatatgtatcaatccattcatacgacggttattggaccacagggcgaaccactcgaagtgcaaatcagaacccatgaaatgcaccaaatcgctgaatatggggtcgctgctcactgggcttataaagaaggtaaagtcgttaattcaaaaacttcttttgataacaagcttacttggttccgtgaaattttggaatatcaaaatgaatcggataatgcggaagagttcatggaaagcttaaaactcgatttattttctgatgttgtttatgtcttcacgccaaaaggagatgtatacgaattaccaaatggctcagttccacttgattttgcttatcgtgtccataccgaaattggaaacaaaacaatcggtgcaaaaatcaacggaaaaattgtcacactagattataaattaaaaacaggcgatattattgatattttaacatccaaacattcttatggaccaagccgtgactggttaaaattagttcaaacttcacaagcccgcaacaaaatcaagcaatttttcaaacgacaagcaaaagaagaaaatgttgaaaaaggccgcgatttagttgaaaaagaaattagacagcttggatttgaaccgaaaaaaatcatggtgactgaaaatcttcgcaagttagctgataagttgaacttttctcatgaagatgacctttttgcagcggttggttataatggcattactgctttacaggttgctaatcgcttaacagagaaactgcggaaagagcgggaacttgaagctgaaacggaaaaactattaacacaagcagaaaataaaccgtctaattcagatgctaataacgagaagctgaagattaaacataatgccggtgtcgtagttcaaggggtaggaaacttattaattcgtctttctagatgctgtaatccagtgcctggtgatgatattgttggttatattacaaaagggcgcggtatttccattcaccgccaagactgcccgaacgtccaagcgattgaaccagaacgtttaatagaagtagactgggaagatacagattcgcaagcaaaaaatgattataatgttgatattgaaatttatggttataatcgtaacggcttgctaaatgatattcttcaagttattaatagcttgacgtccaatattaatggagtcaatgccaaagtagacaataataaaatggcaaccctcgttgtcacactacaaattcataatattaatcacttacagcgagttgtggataagataaaacaaattccagatgtttatacagttagaagattaatgaattaaaggagtggaaaagaagtgcgtgtgctactacaaagatgttatgaagcttccgtccgtgttgaaggggaaattattagtgaaattgctggaggtctatgtctattagttgggtttactcatagtgatactgaagaaacagtagaatacatggcaaaaaaaattattgggttacgagtttttgaagatgaatcagagaaaatgaatatttctttagccgaacggggaggcgcgattctcagcgtttcacaattcaccttatatgcggatgttagtagaggcaaacgcccaagctttacaaaatctgctccaggagaaaaggcggaaggattgtacaatttatttaataacaaactttccgatgcaggatttatagttgaaactggtgtatttggtgcatttatggacgtgaaaattgtcaataatggcccagttactattatgctcgactctgaagaaatgcgaaaataaaaaagcaatcattctggtgaaatttcatcactggaatgattgctttttttagttagaaaaataattagataatccatcagttactgaatcagcaatttggcttctataagatgccgaattaatgtttcgttcgtcttttgcagaactcaagtaaccaagttctagaaggacagctggttgagaattttctcttactacataataatcgccaactcttgagccgcggttagtagtagggagatcatttccaagtgtagtatttatactttcagcgagcgatttatcactattatcataataataagtagtttgtccgctaacacctttgctactatcttctaagctatcaaaatgaatactaataaagacgtctgctttattttctgccgctacattagtccgagattttaaggaaacatatttatcactatttctcgttaaaattactttagcgcctcttgattctaatttttctttcagttttttagctgtttttaatgtcatttctttttctatagtaccattagcgccttttgctcctggatcattgccgccatgaccggggtcaataacaatggtcgcttcggataatttagttgttttacttcgtgggctggaagtttggcctttgtcggacacatcaactacccagttagcaacataaccttcttcgccgcttgtggtacgaattttataccagtcaccttgaactccttgaatggcgaaaccttgaccagaattggctttttcaataacagcgccatctcgtcctggtttatttcttatgtttgtggagtcatcgcgaatcgttactgtttgaagttcgctttcatctacttttgttacggattcacgtatagttaagtactgagaactaacccatgcgcttttaccgttatactgaatttgcgcccaaccattttgttggcttgtaacggttacttgatcaccgttatttagtaatccaagtgatgtgcttgaagtactaggtttttcacgtacattgagtccaccatcagaagagacaatagcaatactgttacttgctgcgctgacatctgtattttctactaaccagctagcaacccagccgctatttccgttatctaattgaactttgtaccattgattttcttcaccaactacccggagtacttcattttttctggcttggcttgttacatcataggctaaaccaggaccgctgcggacatttaagacttctgctttgacgacaacggaattcgcgttcgccattgctatggttgtaaaaatacctgctgcaatcaataaaatggagacaacggtgataaaaatgaatttgttcttcatttaaagctaacaccacccatatactcataaacttttatctgacagtaaaatgttaccataaaatgcgctttcatggaactagaaagtggatttttataaaaaaactgacaaaatgttgacttttcagtgtgtttttagtaatcttagaataattcatatttaaaactagcgacagagaaaagtaagaaaatccatgctatacagagaatttatcccatttggctgaaaggataaagatagtcatattttccgaaaagacactctcgaggtttcttgttgaaaacagtaaacaagaacgtattcaggcgttaactgacttaagtgaggacttattaatagttctaattagggtggtaccacgggtgtaaataaactctcgtcccttgtttttataacaagtgacgggggtttttctttatatttttaaggaggggtatggtgatggatttgcaattaccaagagggacacgagatattttgccagaagaagttagtaaatggcattttttagaatcagcgtttaataaagtttgcgaaaactatcaatacgaagaaattaggacgcctatttttgaacacactgagttatttgaacgaggcgtgggcgattcaacagacatcgtatctaaagaaatgtatacttttctagataaaggtggcagaagtcttacattaagaccagagggaactgcttcggtcgtgcgcgcttttgtcgaacataaattatacggcgaagttagccaacctattaaaatgtactacaatgagccaatgttccgctatgaacgtccacaaggcggaagacaacgccaatttactcaaatgggaatcgaagcacttggtagtgatgatccttccattgatgtagaagttatctcgcttgcaatggagttcttcagaaaaattggtttaactaatattaaactagtcattaacagtcttggtgataaagaaagtcgtttaaaacaccgagaagcactagttgcacattttgaaccacatattgatgaattttgtgcagaatgtcaggtgcgtctacacaaaaatccactgcgcattttagattgtaaaaaagatcatgataatccgcttattcaatcagcaccatctattttggatttcttaaatgaagaatcagttgcttattttgaaaatgttaaaaaatacctaactgcattagaaattccatttgaaattgatccaacaatggttcgtggtttagattattataatcatacaacgtttgaaattatgagtgtagaagaaggctttggagcgaaaacaacactttgcggtggcggtagatatcacggtttagtaaaagaattcggtggacctgatacaccagggattggttttggaattggcgtagaacgaattttacttgccttagaaaaagccgaaatcaatattccagaaacaaaaccgttagaagtatatgtaattactgcacagccagaagctgaattaaaagcagtgacacttgtaaataaattaagacaaaatggaattagcgcagaaaaagattatttaaaacgaaaattaaaagcacaattaaaagatgctaatagaaaaaaagcaatatataccgtaattctaggtgaagaagagttacaaacaggtaattatcaattaaaaaatatggaaacaggcgaacaagaagctgtttcggaaacaactattatcgaaaaactaacaaacaccaaggaggagaaataaaatggaaaaacgtacaagttactgcggtgaattaaacgaaacacatattggtcaaagtgttatccttcatggttgggtgcaaaagcgtcgcgacttaggtggacttattttcattgatttgcgcgaccgtgaaggaattgtccaagtggttttcaatcctgaattttcaaaagaagcattggaaattgcagatagcgttagaaatgaatttgttgttactatcaaaggaaaagttcatgctcgcggggaaaaagcaattaacgataagttagcaacaggtaaagtagaagttttagcagaagaaattactattttaaatacttctaaaacaccgccattttacattgaagacggcgtaaatgtttctgatgaacttcgcttaaaatatcgctacttagacttacgtcgcccggaaatgaacaatattttcaaaatgcgccatacagtaacaagaactttccgaaacaaactagatgcacttggtttctttgatattgaaacaccttacttaacaaaaagtacaccagaaggagcgcgtgattatctagtaccaagccgggtctatccaggtaatttctatgcgctgccgcaatctccgcaaattttgaaacagttattaatgactgccggttttgataaatattatcaaatcgtacgttgtttccgtgatgaagatttgcgcggtgaccgtcaaccggaatttacgcaaatcgatttagaaacaagctttttaacaaaagaagagattcaagcgattacagaagacatgttggtggatgttgttaaagaagcgaaaaacattactatcgaaaaaccattcccacgcatgacttataaagaagcaatggaccgttttggtagcgataaaccagatattcgtttcggtttagaattacaaaacgtttcagaagttgtaaaagatgttgattttaaagtattccaatcagctattgaaaacggcggcgaagtaaaagcgattaatgcaaaagctgctgcaactaatttctctcgtaaagatttagatgcactaggcgtttttgttgctaattacggggctaaagggctagcttggctgaaaatagaagctggtgaattaaaaggaccaattgctaaattcttcccggaagataaagcagcagaattacaagcagcactccaagctgaagatggtgacttattgctatttgcagctgataaagcggatattgttgcagcatcgcttggagcgcttcgtaacaagctaggaaaagacttagatttaattaatgaagatgaacttgctttcctatgggtaacagattggccgctctttgagtatgatgaagaagcagggcgttatgtatctgcacatcatccattcactttaccaaaagaagaagatattccatttcttgaaacagattcttccaaagtaatggcagaagcatatgatatagttttaaatggttatgaaattggcggtggttcgcttcgtatttacaaaaaagaagtacaagaatcgatgttccgcgcgcttggtttcacagacgagtcagcgaaagagcaatttggtttcctaatggaggctttagaatatggaacaccgccacacggaggaattgcacttggtttagaccgtattgtaatgattctggctggaagaaataacttgcgcgacactatcgcattccctaaaacaggaagtgcagtagatccactaacaaatgcaccaggtgaagttagtgcagcacaattagcagaattaaaactagaaacagtgaaaaaagaaactaactaaaaaaagaagctgagcgaccgcgctcagcttcttttttaaaaatcatcacttaattcttgaatattttcgacgtgcactttattaactaataatccttgattggaatcattggaccaaaatggtccgtcaagttccttcgcttcactggagctgattttatttttattataaaaagtggcttccacattgtagcgattccctttttctactgtatcccaactctccttagaaagcggtaaagtaattgatttgtttccagcaccatcaattttgccggtgacggtattatttttatctttttgatccaccacaaagttaaatgtaacatctacttttgacgaagcatgttgataaaggtaataaccgccaaaaagtagtatggctgctagaagggtgaaaatggggattttacgcatagggaatttcgcgcctccttatctgttctaaacgttcttccttttccattataagtgtaaaagctaagaagcggaaggggtaaacgccatttctcattgattttttagaatagaggccccatttttaattaattcaccattttaactattcattttgctggtttatcttgtaaagcatcgatgccggtttcacctgtgctgattttaacgacctcggcaaggggataaataaatacttttccatcaccaggttcgccagttcgaagagtttctttaacgacgcgaaggacatcttcaaccggaacagtagaaacaacaatttcaattttcattcgttcgtgaacattactttcttttttagtaccgcggtataattcaataaatcctttttctaagccagtcccaagtgcttttgtaacagttagtccacttacgccaatttttgcaagttctttttgaaataaatggaagcggtttggacgtgtaataatttcgattttagttaatcctgacatattgtaagcccccttattcttgatatgctttttcgccgtgtagcgtcaaatcaagtcctttgtattcttgttcttcgtttacgcgaattggtaaaaatagtttgattactacgacaattagagctgtgactactgcaacatatgcgacagtagagccaattgcgattaattgttttacaactaaggaagcattaccgtaaaagagaccatctgctccagcttcatttaccttcgttgtggcaaaaagtccagtagcgatgccgccccaaattccgccaattccgtgtaagccaaacgcgtcaagcgcatcatcatatttcacttttcctttcaaccagaatactgcccagaagcaaagtgctccgccaagaaagccgataatcaaagagctaggtactgtaacgaaaccggcagcaggtgtaatggacactaaaccagcgatagcgccagaaattgttccaagcatagtcggttttttattgattaaccattcaaccaatccccagccaataattccagctgcagccgctgtattcgtattaacaaatgcagtcatcgctacattatcaatcgtgagggcgctaccgacattaaacccataccaaccaaaccagactagaatcccaccaataagagcaagcgggaggttatgaggtgaagcagaatcagcttcttttctgcggccaatcattatagctaagacaagacccgttacacctgaactgatatgaacaacatttccaccagcgaaatcaagtgctcctagctcgcgtaaccaaccaccgtcgccccaaacccagtgtgcaacaggggaatatactagtaacgaccataaaataataaaaatcaagtaagcagagaagttcatccgttcagcaaatgccccagaaatgatagctactgttaaaatagcgaaagtcatttggaacatcataaacagaatgtgtggaattgcatctgagtaagtgtcatttgccgcaaaaccgacattatgaaggaaagtccagtcgaaactgccgataaagccatttccaggtgcaaaagctaacgagtagccaacaatcacccaaagaatagaaataattgccatagagctaaaactatacattgctgtacttaacacgtttttgcggcgaaccataccaccataaaataatgcaatccctggtgtcatcaaccaaaccaataaagtacaaaagaacataaatactgattccatactcaactctcctttttgttagataaactaacatgtaatattttatttatgcgtttataatacactatattcaaataaaggcaagaatattttatcaattcaatcaatttggttaggttatctaacatacagcgttttcaattgggtgctttttagatttatttcagaataatcagacaaatgaataggttagtttccgtaaaaatggtagataaaaagcctattttttaataggctttttccattaaatataaaacatgtaaccatctgttagttcagaatcagtagaatgttttagtaagtcagagagggtggtttgatctaacacgtcgcggacagcattgcgcattcgagtccaaagttctctctgggcagcttcttcatcttccatactttcaacgagtacaataggaccttccagtgtgcggataatgtccccggcagtgattttttcagggtcgccgtttaatacatatccaccgtgtgcaccgcggatgcttttgacaattcctgcattacgaagcggtccgattaattgttctaagtaatgctcggataaatttttatcttgcgcaatactgcgaagagagataggcccatcaccaattcttttcgcaagttcaagtgttattgttaagccataacggccttttgttgtaattttcatttttatataacctccagtaatttcaaaaaacactcatatcgcatctattatatcggaattactgtcagaaggcaatggaaacaagcaagtgaacgtacaggtgttcttatggtataatagaaaacaagcaaatgagaaggagcggttatatggcaattcaacctttagcttaccgaatgcgtccaaaagcacttgatgaaattgtaggacaaacgcatttagtcggtaaagataaaattatttatcggatggtcaaagcgaaacaattatcttctatgatattatacgggcctcctggaattggaaaaacttcgattgctagcgcgattgctggtagtactaaatatgctttccggacattaaacgcagtaacaaataacaaaaaagatatggaagtagtagcagccgaggcgaaaatgagtggcacagttattcttctattggatgaagtacatcgtttagataaagcaaagcaggattttttacttcctttacttgaaagtggtgcgattattttaattggtgcaacgacgagtaacccttatatcgcgatcaatcctgcgattcgaagtagaacgcaaatttttgaattaaaacctttaacggtagaagatattatgataacaatggaccgagctcttcttgataaagaacgtggacttggcaattatgaagtggaaatagatgaatttgcgaaaaaacattttgccacggcgagtaatggtgatgtacgtagtgctcttaatgcactggagcttgctgttatttcttctgaaccaaatgaggacgggattattcatattactcttgatgtggcggaagagtgtttgcaaaagaaaagtcttgcacatgataaagacggcgatgctcattacgatgttttaagtgcttttcaaaaatcagttcgtggtagcgacgttaatgcagcactccattatatggggcgtttaattgaagcaggggatttagtgagtattagtaggagaatgcttgttatggcttatgaggatattggtctcgcaaatccacaagccggtgcacacacacttgctgcgattcaaactgcagaaaaagtaggttttcctgaggcgagaattccacttgcaaatgctgttattgaactttgtctttcaccgaaatcaaattctgctattatggcaattgacgcggcattagctgatattcgccagggaaatagtggcgaagtgcccgatcatttacgtgatggtcattattcaggtgccaaaaaacttggtcgagcaatggattacaagtatccgcataattacgataatgcatgggtggatcaacaatatttacctgatcgactcaaaaataaattatattatgacccgaaattcacttcaaaattcgaacaaacaatcgctggtgtgtaccaaaaaattaatgaaaataaagcgaaaaaagaataaaaaattaccaaactgaaaagtcgctaacattgaaatttcgtctttcatatggtattctaagttaagaaaagaaaccctaatgtattcgatatagttcctgatatttttgaaccgaacaattttttatacctagggagcttggagttccggcgcggcgcacatgccttcacacgaggaagtgcaaaccgttagacagagcacccacctgctttaattgagagcgggttcaaaggaagggaatcctaaacggtacgattggggtttcttttttgcgtgtaaataggagttattcctctttactttacaggagtattgctgttacaataagaaacgattaacgacgaacaggaattcgtcaccaaaaaaggacgcgataaaaaatggaaaacagaatttacttagaccatgctgcgacaagtccgattcatccagaagttatccaaacaatgcttggcgcaattactaatacgtacggcaatccatccagtatccattatgctgggcgagaggcaagaaaagcgcttgatgaagcacgtcatactattgcccaaagtattcaagctgaagaaaaagaaattgttttcactagcggtggtacagaaggagataacttggctcttattggaacagctttagcacataaagagaatggaaaacatattatcacctcacagattgagcatcatgctgttttaaaaacatgtgaatatcttgaaacgcaaggttttgaagtcacttatttaccagtagatgagcatgggatagtgtctagtgagagcgtgcaaaaagctttacgccctgatacaattcttgtttctattatgtatggtaataatgaaattggtactatccagccgattgcagaaattggcgctgtacttcttgaccatcaagccgttttccacacagatgcagtacaagcttacgggctattaaatataaatgtaatagaacttggagtagatttattaactacttcttctcataaaataaatggaccacgtggcgtaggctttttatacgtcaaaaatggcacacgtcttgcttatcaaatgcacggcggggaacaagaacgaaaacgtcgcgctgggactgaaaacttagcaggaatctgtggttttagtgcagcttctaccattatgacaaatgaacgtgaacttaaaaatgaggagtatgtttcctttaaaaagcgcatggcggaaatttggcgtgcagcgggcttagattttgaagtgaacggtttagaagcgaatacattaccacatgtttttagcgtgcgtttcccaggagtctccattgagcaattactaatgaatttagatatggaaggcattgctgtttctagtggttcagcatgtacagcgggaactgttgatccttctcatgttttagtagctctttttggagaaaatcacccggcaatccaagaaacagttcggattagttttgggctggggaaccatttggaagaaatagaagcggcggctacgaaagttagtgaagtcgtggcgcgtttaatgaaaaattaagaaggtgaggagctagctttgagtacaaataatagtgacattcgtgtagttgtcggcatgtcaggcggagtagattcatcagtcactgctcatatattaaaagaacaaggttatgatgtcattggtattttcatgaaaaattgggacgatactgatgaatttggtgtttgtacagcgacggaagactatgatgatgtcattcgagtagcgaaccaaattggaatcccgtattatgcagtgaatttcgaaaaagaatattgggataaagtatttacctatttcttagatgaatataaactgggccgtacgccaaacccagatgttatgtgtaataaagaaattaaatttaaggcgtttttggaacatgcagaaagccttggtgcagactatgtggctacaggtcactatgcacaagtaaaaaaagtaggcgacgaaatcgaattacttcgtggagtcgataataataaagaccaaacctattttttaaatcaactttcccaagatcaattgaaaaaagtaatgtttccgctaggtggtatggaaaaaacagaagttcgtgaaattgcgacaaaagctggacttgctactgccaacaaaaaagatagcacagggatttgttttattggtgaaagaaactttaagcaatttttaagtgaatatcttccggcgcaacctggtgatatgagaaccttgaacggcgaagtgcttggtaaacatgatggcctaatgtattacacaattggtcaacgccacggtctagggattggtggagacggtgaaccttggtttgttgttggtaaagatttaaaaaataatgttttatttgtagaacaaggtttccatcatgattccttgtactcagattcattaattgcaacagatatttcctttactaccaattcagaaaaaccaaaaacttttgtttgcacagcaaaatttcgttaccgtcaaacagatacaaaagtaactgtaaacatgcgtgaagatggcacagcagaagtagtttttgcggatccagtgcgtgcaattactcctggtcaagcagttgttttctatgatggcgacatttgcttaggcgggggaactattgataccgtttggaaaaaaggcgcaaagttaaactatgttggttaaaattagaaccggagaatcttgttttctacgagactccggttttttcctgtttaaatgagttattttaaggcgattttatggtaaaatattaaacgatacaaggaaaagaggtcctttatgaaaaagttagcgattttcgggagtgtaatagttttattttgtcttctaatttggggatatttttattttaattctgagccatcaaatgtagctgaagaagctgcaaactcaacaaaaacggttgatgtgcttgaggaaaatgatatacttgtttttactccgcgaaagtcggatgcaggaattagtgttattttgtatccaggagcctttgtggacgcactgagctatgcgccacttgcgaacaaactagcttcgagtggttataaaacatacattgctgaaatgcctcttaatttagctgtatttggtaaaaatcgtgcggctgatattattgatgaagcacctgatgaaaagtttgtgattggcggtcattcgcttggaggcgttatgtcttcccgatttgcacatgaaaacgagagtgaaatcgaaggcgtatttttcttagcgagttatcctgataaaaaaggttcgctgaaaaatgcctctttcccagcgctttccataactgggacaaaagatgatgttttaaataaagatgcttatgataaaaataaaaaatacttgcctaaagatactacatttgtatctattgagggtggaaatcatgcgcaattcgggtcatacggagcccagcatggcgacgggaaagctactattagtgaggcggaacaaactgatcaagtttcaaacgctctgatagcatggttaaatacgtctgtaaaaaaccaagaaagatagaggagaatttaaaatggataaaaatcaattaggaatcaaacaaatgcaagaaggaaacttagaagaagcagttaaactatttacggaagtaattgaagaacatcctagtgatccagttggttatattaattttggtaatgttttactatcaatggatgattttgaacgcgcagaattatttttcaaaagagcgcttgaactagatgacacggttccggcggcttattatagcttaggtaatttatattacgaattagaacgttatcaagaagctgcggatagctttcaaaatgcaacaaaacaaggaatggaaaatggcgatttatttttcatgttaggaatgagttttgttcaaatggaagagttaacgctagctatgccttatttacttagaagtgtcgaattaaatccagaagatagtgaagcgttatttcaatatggtatcgttcttgctcgcagcggattttacgaagatgcgattaatatgcttgaaagagtacttcttattaaacaagaagatccagatgcactttataatatcggagctgcttatctggcatggcaaggcgacattgtacttgcaaaaaattactttgaacgcgcgcttgcaactggaataccgcatgaacttgctgagaatgctttaaatgctattcaagatttagaaaacgaagcggaataaaaatatagaaaggagacggctaaagatggctgaacaagaatctctcgccttatttaatgataccccagaagaacttttcatgaaggggacgatgttgtctaccattttttataatgccgaaaacctcttttctgtggtaagaattctagtaaaagagacgaatgcgatttgggatgaaaaggatattattgtaactggttttttcccagcacttcatgaacaagaagtgtatactttttacggaaaaatgcaggaacatgctaaatttggtcagcaatttaaagcggaccggtttcgaaaagaaatgcctcaatctcgcgctggcttgattaactatctttcaggggaacttttcaaagggattggtaaagtaacagcggaaaacattgtcgatacaattggtgatgacgcgattacgaaaatactatctgacccaagtttactaaatactgttcctaaactgccttctggaacagcggaaagtttgcttgcttcccttagagaaaatcaaggtttagagcatgtgatggttggtttaaatgaatatggctttggcccgcaattatccatgaaaatttttcaggtatataaacaaaatgcgatcgaagtgctagaaaataatccttataaattaattgaagatgttaaaggaattggtttccagcgtgctgatgagcttggacgtaagcttggacttggcggaaaccatccagaacgacttagagcaggaattttatttatgctagattccgtttgtatgcagcaaggtcatgtctatatggaacaagaggttttgctcggggaagtaacttatctgctagaagaaagtgaaggcattaggattgatcaggcaattttactgcaacaaatagaaaaacttgcagaagaacaaaaaataattaccgaaaacacgcgcgtctatatgccgtcactttattattcagaaagcggttttgcttaccatgtaaaacgaatgttaaagcaaacagagtatcaagaacaatttccgcaatcggagtttttattagcgcttggggaacttgaagagcgcattggcgtgcattacggggaatctcaacgtgcggcattagaacaagctttaatgtcaccgatgcttgttcttactggaggaccaggaacagggaaaacgactgttattaaaggaattgtagaattatatgccgagttaaatggtgttagtcttgatccacatgcctataaagatggtgcgacttttccagtgttactcgcagctccaacaggtcgtgcggctaaacgaatgtctgaatccactggccttccagcaatgacgattcaccggttacttggaatgaatggccaagaacagatggatgacgatgcagaacgattaattgatggacgtttgttaattgtggatgaaatgtcaatggtggatatttggcttgcgaatcaattattccgcgctttacctgctcatatgcaagtagtgctcgttggcgaccaagaccagcttccatctgttggacctggtcaagtattaaaagatattcttcaatcagaacaatttccgacggttgcactttcagatatttatcggcaaaaagatggttcttccatcattgaaatggctcattatatcaaagaaggaatgctgccagctgattttgcgaaaaatagtgccgatcggtcatttttccactgtactgtaaatcaaattggtgacgttgtggaacaagtcgtgaaaaatgctaaaaataaaggttttcgtgcaaaggatattcaagtgttggctccaatgtatcgcggtccagctggaattgatatattaaataaaaaactacaagaaatctttaatccaaacgatactggtcgacgaaaagaagtacaatttggcgaaatcaaataccgggttcacgacaaagtgttgcaactaatcaaccaaccagaaaaaaatgtttttaacggtgacattggcgaaatcgtatccattatttatgccaaagaaaatacggaaaaacaagatttaattgtcgttcaatttgaccaaacggaggtttcttattatcggcaagaatttaatcaattgacccatgcgtattgttgttcgattcataaagcgcagggtagtgaatttccgattgttataatgccaattgtgcgtagttattaccggatgttgcgtagagatttgttatataccggcgttacaagaagtaaacaattcctaattctttgcggagaagaagaagctttccgaatgggtgtagaacgtgtagatgaaaataagcggaatacaacgctatcggaacgtttaatgagtgaagatgtgatgctcgaacaaatgacaaataaacgaatattaactgccgaaaacattacggagattgatccgttgattgggatggaaggaattactccagaacaatttatggcaggatgaaaaacacccactcgcaagtgggtgtttttttattgctcattatcttggaaaaacggtaaacgaatcgtaaatgtcgtgcctttatttggctcgctagtaacgctaatggttccatcatggtattcaattaactgtttcacgatagaaagaccaattccagattccccgaaagctgtattcgtgcgggacatatctgctttataaaatcgttcccaaatctgttctagttcttctgtgttcatgccgatgccagtatccgtaatcgttaatacagattccttataatcttgagtcccagttaaggtaatcaggccattttcagtaaactggacaccatttttaacaatattaataaatacttgagttaaacggtcataatcagcgtaaatatacatatctttatcaatatcgactgtaatcttattgcctttttcagtggctacataatctagttgttctttaattagctctaaaaattcacgaccattaaagcgagttttttgtagtttgattttattgctgcgtattttttcataatcaaggttttcattaaccaattttgttaatcgttttgcttctgtgtctattaaagcaatacagcgatctgtttcactttttggaataatatcgtttactagaccttctgttaagccactaattgttgtgagtggggtacgcatttcatgggaaacatccgcgataaactggcgccgacgtttttcttgtcgttcaatttcttcttgagatgtttcaagcgtttccgtcattttgttgaaatcaatggcaagtgcgccaatttcatcaaaattattctcttttagccgcgccttataattgccttggatcacatcttttgttgctgaacgcaatttattaatccgattgacttgtagtttggacagaatagcactcaaaataagcgcaatcgttatcgatagtaaaatagtatagaacatataacgattaattgttccaatcacttgttcagtcccgctaattggagaatttaagacgatggatccaacaaatttatcgccatccataattggtacataaacaatagtcatttcacgattaaaacgattgtcgatttttttactaactgtttcgccactttttaattttttcttatcatcttttgaaattgaaaaatcttttggtaatggttgattgagctgagtagggtaaatcgtttcgtcatctgcatttttgatggtgtaatggatctttttaacatctaaaatgcgctgatacgtattaagaacttgaatggttgcatcttgcggcgagtggcgaatgtccatcgaaatcgtttcaccataactagttaaatcatctacttggctttgataaaaatagtcttttagtgagtgagaaacaagcacgccaatcataatacaagcaataagtaaaatgataaattgtgtgaaaaaaagttggtaggcatatttaaatttcattcgcttcattccgtttcatcaaatttatagcctacaccccaaacagtgtgtaaaaatggcttcgtgtctgttgcgattttttggcgtaaacgtttgatatgaacatccactgtacgctcatccccgtaaaattgataaccccagacttgctcgagtaactgttctcttgaaaaaacttgacgcggatgttgcattagaaagtaaagcaaatcaaattctttcggagtcaaggcatcaagcagctcaccttgataaaaaatttcccgggtgcgcttactaattttaaaataagttgtttctagaatgtcttcatcattttcagtcgtcgtatgattgttttttcgacgagtaacagctttgatacgcgccattaatgtaagtgggctaaatggtttcgtaacataatcatcagcgcccatttcaagaccaagcacttgatcagattcagactcttttgccgttaaaataataatcggaacatcactaacttcacggattttacggcaaattgtcattccgtccatatttggcagcattaaatcaataattgcaatatcaaaatcatccttaaaaaatgtttcataaccaagtttgccatcatgcacaaacgtagcatcaatttcttctttcataaagaacatttctatcatttcacaaacgctgacattatcttctatcataagtagtttcatattttgtattcactcctcttacattaaaactagactaattagacccaataatcaagccaaattatttttttcgcgaaagtttaaaatatgcatcatagtttgttcatactttcttcataaatgcccagtaatcttagtggggtagaaacagaaatggaggaaatcacatgaatttttttaagagagcatggctcagcatgaaagcaagaaaaggtagatctgttttacaactaattattttcacagtagtgtgtgtgcttattttatcaggctttaccattcaatccgctgcagataaagcaagcgaattagcgagggaacagctaggaggtacagtaacattaactgttgaccaagaaaagcaaatggctgcaatgaaagaagaggctgcaaatagtgatagcagttcgacagactcaaaaccaaaatttcaaagtaacccaattgatgtaagcgatgcgaacgaattagcatcattagatcatgtgaaaaattacaattactattcaagtacgcaagcattagcgtctggatttgaccctattgaatcttcaggtgacacttcctctagcagtgatgattcctcgagttctaatcaaacaggaggtccaggcggtggaaatggcggtccgcaaatggtagatgcagacttaagtattagcggtctacttgattccgcaacaagtaccgattttgatgcaggaacaagtaaattaacaagtggtgtagctattacagctaatgataaagataaaaatgttgcaatggtagaagaaaacttagcagaacaaaatgactggaaagttggcgactcttttaccgttacttcaagtgatggaaatacaaaagtaacactaaaaattgttggtatttataaaacaacagattcaggcagtgatatggcgcaaaacttctccttcctaaacccttataacaaagtatacgttccttatacagtagccaatactattaaaggttctgattataaagacacagtagactccgccgtttacactatggatgatgcggctaatatttctgcttttgagaaagaagcaaaaaaagttgatagcattgactgggatacatttaaattagatgctaacgatacactttatcaacaaatgattggtccaattaatagtgtagcttcgttttctaaaaatgtagtttatatagttagtattgcgggagccttaatcctaggcttacttgtaatgatgcaagtacgtgatcgtaaatacgaaatgggtgtgctattagctattggagaaaaacgtggtaaattaatcgctcagttctttgtagaaattttaatagtagcgctcgtttcctttggtttagcagctgcaagtagtcattatgtagctcaattagctggaaaccaattactagcacagcaaaattcatctactacaagtgaatcaactacttcagaaaatcgcggcccaggtggcggtggtccaggaggtccaggtggatttgcgggaagtgttagtaacttaacgaaaaatacagaacaaattaaagaactcaacatccaagtaactttagaagatatgcttaaaatgggtggaattggtataggaatcgcctttatatccgttcttttaccagcagcacttgttcttcgtatgaatccaaaaacaattctaactaaacaggagtaggtgacgatatgaccaaagtattgacgtttgaaaatatctcttattggtataaaacaaaagatgaatcgattttaagtgatataaattatgattttgaagctggtgttttttacactgtagtaggaagttcaggctctgggaaaacgactttcttatcgcttgcaggaggactggatacgcaaaaagaaggagacatctactataaaggtagttcactcaaaagcattggcttacaacaatttagaaatagatatgtatccattgtattccaaagttataatttattaacatatatgactgctcttcaaaacgtaacaactgcaatggaaattacccatgtcaaccagccagacaaaaaagcttttgcactaagcatgcttgaaaaagtgggcattactgagaaaatggcgcgccaaaaagtgctgactttaagtggcggacagcagcaaagggtttccatcgcacgggcgttatgttgtgaaacagaattaatcgttgctgatgaacctaccggaaacttagacgaacgaacaagtaaagaagtagttacgttattccaagatttagcgcataaagaaggaaaatgtgtcattatggtaacgcatgacccagaaattgcgaaagtgtcagatgtaaaactaactcttaaaaacggaagctttgttgaaaagaaacaatcaacgaatagcttaataaacagttgacatttagccatccgttctttataatttagtttattgttgaataaatattgatacatgataggaatatgattttggtttccacgtgattagagagttttcccttggctggaaggaaagccacgcttgtgccgaagttgctctcccattagatggtccgtcttatccacgttaacagataattgaagaggtaatgatacaaagtctatatcattgcaaacagggtggtaccgcgatttaccaaaatcgtccctgtgagcaatcatataggctttttttgttgtaaaaaaccaaaaggaggaaataaaaaatgaaacaattatcaagcgcagaagtaagacagctatttttagatttctttaaagaaaaagggcatacaatcgaacctagtgcaccacttgtaccaaacaacgatccgacgattctttggattaatagtggtgtagcaacaatgaaaaaatactttgatggttcggttattccggataatccaagaatggctaatgcacaaaaatcaatccgtacgaatgacattgaaaacgtaggtaaaacagcccgtcaccatactttctttgaaatgctaggaaacttttcgattggtgattactttaaagaaggcgcaattctttttgcttgggaattcctaacaagtcctaaatggattggctttgatcctgataaattatatgtcactgtttatcctgaagacgaagaagcgaaaactttatggcgcgaaaaaattggcttaagtgaagatcatatcgttgaaattgaagataatttttgggatataggtattggaccaagtggcccggatagcgaaattttctatgatcgtggacctgcttttggagatgacgaaagtgacccagaattatatccaggtggcgaaaatgaacgttacttagaaatttggaaccttgtattttctcagtttaaccataatccagatggaacatacacaccacttcctaaacaaaacattgatactgggatgggtctagaacgcatggtttctatcatccaagacgcgccaacgaactttgaaacagatttatttatgccgattattcgtgaagtagaacaaatttctggcgtgaaatacggtcattcacaagaaaatgatgttgcgtttaaagtaatcgctgaccatattcgtaccgtagcatttgcaattggcgacggcgcattgccatccaacgaaggacgcggatatattttgcgtcgtttacttcgccgtgcagttcgttacgcgaaagtacttacaatcaatgaaccatttatgtacaaattagtaccagtcgttggtaaaatcatgaatagtttctatccagaagtagaaaatcaaaccgactttattcaaaaagtaattcgtacggaagaagaacgattccacgaaacattaaatgaaggtctggcaatccttgaaacaatccttaaaaatgccaaagaaacaaacgaacaaactatcaaaggcgcagatattttcaaattatatgatacatttggtttcccagtggaattaacggaagaatacgcagaagaccatggcttaaaagtcgatcatgctggatttgaagctgaaatgaaagaacaacgcgaccgtgctcgttccgccagagcagacgtgaaatcaatgcaagttcaaggcgaactgctagctaatttaacagataaaagtgaattcgttggttataatacaacagaacatgtttctgaaatattgtatttaattcaagatgatacgcttgttgatgaagtagcttctggaagcgaggcacaagttattttcaaagaaacaccattttatgcagaaagcggcggacaagttgctgacaaaggaacgatagaaagcgaaacaggagttgcttacgtagaagatgttcaaaaagctcctaataaacaaaacttacaccgtatttctgtaaaagaaggcgtattaaaaacaggcgatacagtgaaacttgctgttgacaaagtaaaacgtcgtgaaacaatcaaaaatcatacagcaacccatcttttacatcgtgcactcaaagatacattaggcgaacatgttaaccaagcaggttcactcgtttccccagatcgcttacgttttgacttctctcattttggtcaaattacagaagaagaattaacaaaaatggaagaaatcgtcaatgaaaaaatctgggaacaaatcaatgttattattgaagaaatgccgattgcagaagcgaaagaacttggagctatggccctttttggtgaaaaatatggcgaggtcgttcgtgtggttcaagttggtaaatatagtattgaactttgcggtggcgttcacgttcgtaatacagcagacattggtctatttaaaatcgtttctgaaacaggtatcggagcgggaactcgacgtattgaagcagttaccggaaaagaagcatatcgctttgtgactgaacaagaaaatacactaaaacaaactgctaacctactaaaaacaactacaaaagaaacgccgcaaaaagtagagcaactgcaagctgatttacgtgaagtaagacgtgaaaacgaatcattattaagtaaattagcaagtgctgcaagtgccgatatttttgaatcaccagaagaaatcggtggcgtaaaagtaattgctaaacaagtaaatgcgaaagatatgaaccaattacgtcagtttgttgataactggaaagataaaaaaattggtggcgttcttgttctaggagcagttcaaggtgataaagtaaacttgatttctgcagtttcagaagatgcaatcaaagctggctatcatgctggtaaacttttaaaagaagttgcgacacgatgcggcggaaatggtggcggacgtcctgatatggcgcaagctggcggtaaaaatccagctgaactaggaacagctcttgattatgtttctacatgggtgaaagaacaacaagcataaattttcgttaaagcacttcatttttctttgttatttccgttcacatggtgtaaaatgaatagagatacatgaaggaatgaggtgcttcgattatggattcaaaagatcaaacaatgttttacaacttcggcgatgattcaattgaagaagatgtaaaaaaattaatgaaacaagtctacgttgctcttgaagaaaaaggctataatcccgttaatcaaatcgttggctatttactctcaggtgaccctgcctatatacctcgtcacaaggatgcccggagcatgatacgccgtttagaacgagatgaaattatcgaggaacttgttaaagcgtatctgaaaaataacgaaattggtgagaaatgagaataatgggtttagatgtcggctcgaaaacagtcggcgtagcgataagtgatccacttggttggaccgcacaaggtgttgaaaccattcagattgacgagagcagaaaacaatttggctacgacagagtaaaagagctcgtgctcgaatacgaagttgaaaaagtcgttgttgggctacctaagaatatgaataataccatcggacctcgtgctgaaagttccaaaatatatgctgaagtacttgagtcaagaattggacttcctgttgtactttgggatgaacgtttgaccacttctgccgctgaaagaactttgattgaagcagacgtttcgcgtaaaaaacgaaaagaagtaattgataagttagctgcagtaatgattttacagtcctatttggacactactaattaatttgaggtgaatttaatggcagaagaacataaccataatcatgaagaagaaaatattatttggattacaaatgaagaaggaaaagaagaagcttacgaaattctttttgactttgattccgaagactttgacaaatcttacgtattatatttcccagcaggaaaaggggaagacgaagaaatcgaaattcttgcatctagttacattcaagatgaagaaggtaaacaaggtcaacttaaacctgttgaaacagacgaagagtgggatatgattgaagaaatacttgcaactttcctagctgacgaagacgaagaataatataaaaaaagcatgtcctgacaaaaactgtcaagacatgctttttattttgcgtttctagcgcgtttattccatactttgtaagcaaggtagacaacaattgcaactactagagctaacattaaatagctaattggtcgtgtatatttttccacaacgctccaattggaacctaatgaataaccgagccatgtcagaaaaatattccacggaatgcagcctaaaatcgtatatataacaaatttccagacattcattttggcaattccagctggtaaagagataaatgttcggataactggcaaaacacggccgaaaaatacagctcttgcgccgtatcgaccaaaccataattctgctttatccaagtgcttcacatttaagaatatatactttccgaatttcaatactaaagctctaccaccgaatttaccaatgtagtaagcaatcagtgaaccaactaagttaccagcgataccagcaaatacaacgagccagaaattcagtttcccagcttccgccataaatccgccaaacagcatgataacttcacttggaagcggaatgcagacactttcgataagcattccgaggaaaattccccagtgaccaagtgagtctactaaccacatcgtgaaatcttgcaaactttgtattaacgtatgtaacatccaaaagactccttcaatctttatttaattggcagaagcaagtccttgaccgattctgtcttgttcgtttaatcacgctgtttattataccgaaaaaacataaaaacgtcactttttaagaaaattttccgtattgaatagcattttttttagataatcggtataatagataggaattgttttcaatgaaatgaggtctataatgaagaatacaaaaggtaagaaaattacaattattatttctattatcattctaattttagtaatcgcaacttttgcagggtattattatgtgaagtcacagctagagccaagagatgaagcaagcaaagagaagatcgctgttgaaattccagcaggatctagtatttcagatatatctactattttagaagataaaaaagtcattaataacgcttctattttctctttttatgtaaaatacaataatgatacgaatttaaaagctgggaattatgaattcacgcaagctatgaacacagatcaaatcgtgaagaaaatgcaagaaggaaagactgtcgcaccggcaaaactagtcattccagaaggatatacactcgatcaaattgctgatagaatcgtcgcttatcaacctaaattaaaaaaagccgatgttcttaaaataatggataatccagagtttgttgcttctattattaaagcattcccagagactgtcacaaatgatgttttgaataaatctataaaacatccgttagaaggctatttatatccagcgacatatacttttaaaggctcggatgtatcagctgaaacgataattaaagaaatggtgaaagcaacagacgttaatattgctaagtaccgcgacgaactaacgaaacaaaaaatgtccgtgcataaattcctaacaatgtcttccattattgaaaaagaagcaactgccgatgtggatcgcaaaatgattgctagcgttttttataatcgtttagcaaaagatatgcgtttacaaactgatcctactgttctttatgcgcttggtgaacataaaagcaaaacaacctataaagatttagaagtagattcgccgtataacacatacaaaaacaatggactgccaccaggaccgatttctaatagcggtgacacatctatggaagcagctctttacccagaaaaaagtgattatctatactttttagcgaatacgaaaactggtaaagtttatttctctaaaacattagaagagcacaataaactaaaagaagagcatattacgaaaaataattaaaatgaaccacttgtcagaaacgtgtattgcatgtttttggcaggtgctttgtttgttaaaatgaggggatttagcagtgaatgatataattcatgattatttattaaaacatattccaaagagcacgcctttttttgaagaattagaagtatacgcaaaggaacatgaagtgccgattatggagccagattcgttacattgtttattgcaaattttagatattcaaaagccggaacgtattttagaacttggaacagcaatcggatactctgctttaaaaatggcagataaacttccaaaaacggaaattatcacagtcgaacgtgatgaagaacgatataaagaagctttacataatatagagcgttacggggcttctgacagaataaaagtcttgcttacggatgcaattgaaggatcagaagaaattttaacgtatggtccgtttgatgccatatttattgatgctgccaaagcgcaatatgaaaaatttttccatatttatacagattcccttgctccagatggtgtgatttatagtgataatgttcttttcaaaggacttgcgcttgatatgtcaccagaaaaacagcgtaaacttcgagttgctcgtaaaatgcgccattttaatgattttttagtgacgcatcctgattttgatactacaactattccactcggagatggtttatctatttcaaaaagaaagaaaactggaggcatatcatgacaaaaaaaccaatcgtagtcggtgtaactggtggttcaggttcaggaaaaaccagtgtaactaaagcaatttgtgatcattttagcgggcattctattttaatgattgcgcaagatgtctactatcatgatcaagcagatattagttttgaagagcgtttaaaagtaaactacgatcatccgttagcatttgatacggacttacttatttcccatatagcagcactacgccgttatgaaacaatagaaaaaccaatttacgattatgaaaaatatacgcggaaacaagaagtagaaattcaagaacctagagaagtaattattttagaaggtattttaatcttagaagataagcgattacgcgacttgatggatattaaagtatatgttgatacagatgacgatattcgttttattcgtaggttattaagagacatgaaagagcgaggtcgaacgatggattctgttatcgatcaatatctttctgtagtaaaaccaatgcataacgaatttattgaaccaacgaaaaaatttgccgatataattattccagaaggtggagaaaatcatgtggcaattgatttgatgacaacaaaaattgaatcaatcttgcaaaaacatgtataagtaacaggtaacacttgtcaaacagattaatttaaggtaaaattttcctagtaaaaagagagacaattgcttgctatttctagcgtggcatgttaatctttctcacgagtagtaatgtttttttatgaaggtgcggagcgatatctccgtgcttttctatacaataatgaacaaacaaaaggagcgaaaacgattggcgacagaaaaagtatttccaatgaccctagatgggaaagcaaaattagaaaatgaattacaagaacttaagacagtaaaacggaaagaagtagtagaacggattaaaattgcccgtagctttggcgatttatctgagaactccgagtatgattccgcaaaagacgaacaagcttttgttgaaggtcgtatcactactattgaaaatatgattcgtaatgctcaaatcattgatgcagcagaagctcataatggtttagtaacacttggaaacaccgttacatttattgaattaccagacggagaagaagaaacatacacgattgtagggagcgcagaagctgatccttttgaaggtaagatttctaacgattctccaattgctaaaggtttacttggtcataaagaaggggaagaagtaactatccaaacccctgctggcgacatgagtgttaagatcgaaaaaatcactgcatcttaattttatctgtttttatacagcggttacttataaggtggtgaaagcaaatggcagataatcgacaatcaaataaccgtcgcattaaacaaaacttagtcgaaggatctcgctcaagacaaaatacaaaacgaaaaaaaacgaatctagttttaaatcttttaattatcgtggtaagcttacttatcattggtagtctatattttgtactgtttaaaacagaaagcgatccaactcagcaagaaaacaaaacggcatcttccaatgcgaaaaaagaagatgccgctaaatcaaataaaacttccgaaaaaaaatcgacttcttcggatgaaaaaacaacagaaacgactaaaagtgatgatcctaatgtggcaaaagttattacaaaagactggaaaccaattggaactgagcaaactggtgatcatgtgaattcctacagctctacaagtgtagactggcaagaaaaacgcaaagctttttcagcagcgacagatatcccaatctcaaatacatcactttggtttgtagagcaaggggctgaccctgctactcaagcaattggtacactttctactaaagcaaatcctgataaagcttaccgtgtttatattacatgggtagacggtgaaggatggcaaccaacaaaagtagaagagctaaaaacaaacgacaaaagataaaagcacagaagttagttgttaacgactgtgctttttttggaggttacataatgacaataggcattattggagcaatggaagaagaagttgaactgttaaaaaacaccatgcccagcatagaagaagttattatcggcggagcaaaattttatatcggtgaaattgctggtaaagaagttgtgcttttagaatcaggtatagggaaagttaatgctgcccttggtaccacgcttctagcagaccgttttaaaccagaaattattattaacactggttcagctggaggtataggtgaaggcttagcaattggcgatgtcattatatctgatcgcttagcatatggtgatgttgatgttactgaatttggttatacatatggccaagttccacgtatgccagctttttatcaaggcgatgctgttcttttgaaaaaagctgagactatttatcgtgattattttgcagatagcgaaaataaagctgtatatggtcttgtaattacaaatgattcatttattatgcgtccagatcaacatgaaattattcgaacatttttcccggatgttaaagctgtggaaatggaagctgctgccattgcgcaagtagcctatcaatttgatattccatttcttatcatccgagctatatcggatttagccaatcaagaggcgacaatgtcttttgatgagtttattcatttagctgcaaaacaatcagctatttgtatcatcgaattattaaaaacaatataaaaaatccaggagagagattctcctggatttttttattttacgtattcttccgttaaagtaagaaaatcttctacatctttagcggctagggcaactgcttcttcccagaaatcagctttacgcaagtcgactccaagatgtttttctgcaagttgttctgttgtcatcgaacccgtatcttttagaagcgcaatatatttatcttcgtagctagcaccttccgcttgtgctttgtgataaataccaagcgagaataagtaaccaaaagtatatgggaaattgtaaaatggtacatcagcaatataaaaatgtagtttagaagcccaaaattgtggatgatattcatctaaagcatctaagtaagcttcacgttgcgcttcctccattaaagaattaagtctatcaactgacactacaccttgtttgcgtgcttcatagaaattgcattcaaaaataaatctagcatgaatattcataaagaaagcaatactacgaccaattttatcttctagtaaggtgattttttcttcttttgttttggcatcttttacagaagcatcggcaataatcatttcagcaaaagtagaagcagtttccgcaacattcattgcgtaatcagtgttttcaaatggctcttcccgaataacatgagaatggaaggcgtgtccgagttcatgtgcaagagttgcaacagtaccaggagctccgtcatatgtcatgaaaatccggctttctttttcgaccgggaaatccgtgcaaaagccaccaggacgtttattatcacgatcttctgcttcaatccaacctttttcgaaagcggatttcgcgaagtttgccattttcgggctgaatttattaaattgttcgatgataaaatctgcgccttcttgataagtatatttttttggttcgcttgagaatacaagaggagcttcgacatcataaaagcttaatttttcaagcccaagcaatttagcttttctatctaagaatcggacaaaagtcggcttgttcgtttgaatgacgttccacatagattttaatgtttgttcatccaaacgattaatagcaagtggttcttctaaaatattatcccatttacgaatttcgtatgtagctaaacggaagcctgataaatgatttagagtatcgctaaagagatgagattcttcttgccaaacacgagtatattctttgaaaactgcctgacggactgcgcgatcagggtgatttaataagttcagagcttgtccagcagatacggacttttcttccccgtcagtagtaatgtgcatccgtagtttaccaacgattgtatcataatggtctgaccaaccacgataaccatcaacagctaaagaattaatcgctgcttcttgttctttactgccttttttacgacggtttgtacgtgcttcacttaaaataaaactaatttgtgacaaaccattttgctgcattagttcatcccaaacacggtcagatatttgagcaaatttgtcatgccattcatcttctgccgtcgatagggtagccacatattgataaattaacgcagaaagttcatttgcacgagtatcattaacatcggctgaagcaagacattctaaaaaagaaccagcagttaataaaacttttgagatgtccgcattttgattaaccaatagtagaaattctactgaagcttcgacggtttcgggaacttcccactcagctacattcacgacaaagctatccaaatcagcttttacctcttgaagtgtttgctgtaattcttcagaaccactaccgccaacatatatattttctaaatcccaagttaatgcataatcttttgacattcgtctacctccttaaaaaaataacatttcctttcatattatagcatttttctaaggtttttttgtaaaataagcagaaagatggtaaaatttatagattattagtctaattgaatgtatgatagaatagactgtactaaataaaagaatgaggtgccaatacgtgttaaagcaattctcaccagataaaatgttgaatactccatttggaataacagcagatcagcttcgtaaaatgggaaagactactattttaactgatctcgataatacgctgcttgcttgggatcaactagatgcaacggatgaagtaatcaactggtttactatattgaaagaagaaggaatcaaagttatgattttttctaacaataatgaagaacgagttgctcgtgtggcaaaagcaattgatgtcccttatttagcgcgggcaaaaaaacccttaggcgctaattttcgctgggcgctaaaagaaatgaacgcaacaccagaagaaactgtgatgattggtgaccaaattatgacagatatattcggtggtaatcgtcaaaaattaacaactatttttgttcgtcctgtaaaacaaacagacggtatggcgacaaaattaaatcgaatgatggaaagtattattttaaaacggttagcaaagaaaaaccaaattaagtgggaggaatcactttgacagaagaaataagatgtattggttgtggggccattattcaaacagaagatcctgataaaatcggctatgctcctaagtcatcgctaaataatgaacaagttatttgtaaaagatgttttcgtctaaagcattacaatgaaattcaagatgtggcgctgacagacgacgattttttacgtattttaaatcaaattagttcgaagcaagctttaatcgtctatgtagtagatatttttgattttgatggcagttggttgcctggacttcctcgttttgcaggaagcaatcctgtattacttgtcggaaacaaagaagacgttttaccaaaatcattaaaacgtgataaattaactcgctggatgagaactcgtgcaaaagaacaaggtttggcggcaacagatgttgttttagtcagcgctgaaaaagggcacggttttgatactcttttagaaaagatagaagaattacgaaatgggcaagatgtgtatgttgttggttgtacaaatgttggtaaatcaacgcttatcaaccgtatcatcaaacaagcttcaggtgaaaacaatgtgattactacgtcgcaattcccaggaacaacacttgataaaatcgaaattccgcttgctgatggcaatgtacttgttgacacacctggaattataaatcaccatcaaatggcgcattttatcgatacaacaactttaaaagctatcacacctaaaaaagaagtaaaacctgctgtcttccaattaaatgaagaacaaaccttatttttaggcgcgcttgctcgtttagattacgtgtcaggtggaagaaaatcattagttgtctatgtatctaataatttaccaattcaccgaacaaaattagaaaaagcagatgcattatatgaaaaacaagccggttttgttcttcaacctccaacagaagaagggatgaagacacttcctaagctcgtaccgtatacctttaccgtgaaagataaagcggatattgtgttttctggacttggatgggtgacaatacctgaaggcggcgcaaaagtcactgcttgggttcctgaaggcgttagcgcaacaatccggacatcactcgtgtaaaactaaggaggcctggcatttggaaaaatatgttgttatcggaaatcctattcgtcactcgttatcaccagctatgcaaaatcggattttccaagaacttggaatgaacgcggagtataactctgttttgatagaagaagatacttttgagacagaaataaaaaaattaatggattctggagtgcgcggatttaatatcacgacaccatttaaagagcgtattctaccatttttagatgaattagaggatttggcagcagcatcaggcgcagtgaatacagtgcttagaaaagatggcaagtggtatggcttcaacacagatggcaaaggttatttagaaggcttagaagaaattcgttcaattacaaaagacgattctattttaatcacaggagcaggtggagctagtaaagcaatttatcttgcacttaaaagccatactgaggcgaaaataaccgttgccaatcgaacaacggaaaaagcgatagaaatgacgaaagataatgataatcatcatgccatgacactagaacaagctgaaaaagaactggctgattttacaattattatccaaactacttctatcggtctagaagcttctaagaataaaagcccaatttcgctttctaatttaacaaaaggaacaatttgttctgatattatttataatccagccgaaacagcctttttaaaagaagcaaagaaaaatggggctattacacaaaatggtttaccaatgtttgttaatcaaggggcactagcctttgaaatatggactggcattaagccagagcgatcaatgatgaaagaagcagtactcgaacaattaggaggaaactaatgttaacagctacacaaaaacgttttttaagaaaagaagcacacacaattcaaccaattttccaagtaggaaaaggaagtgtgtcaccaaatttaattatccaagttaaagaagcacttgaagctagagaattaattaaaatctccattttgcaaaattgcgaagaagacaaacaaacagttgctgagaaaattagcacacgtgcaggagcagacatcgttcaagttattggcagaacaattattctttacaaacaatccgtaaataagcaacaaattaagttgccttaaatttggaggaaacctgtcatgaaacataaagtcggtatcttaggcggcacatttgatccaccacatttagcgcacctccatatggcagaagaagcaaaagcgcaactcggtcttgaaaaaatcctttttctccccaataaagttcctccacataaacagattagtggtatggcttcaaatgaggaacgagtggaaatgcttcaattgatgatagaagatagggattcttttgaaattgacactcgcgagcttatgcgaactggaaagtcctatacgtatgatacaatgcgtgatatgataagcgaacagccgaatacggatttttattttattatcggcggggacatggtagaatatttgccaaagtggtatcatatagatgacttagtaaaaatggtgacattcgttggggttaaccgcccactatatcaaaaagaagttccgtacgatattgttaaaatcaatatgccggaaacagctatttcttcaactgaaattagaaatgatattgaacacgcagaagcctttttaccagaaaaagtatggtcatatataaaggagcatcaactttatggaaagaaatgaagtgctaaaaaaagtagaagaagctatgccaactgcaagattcaaacacactttaggcgttgaaaaagcagcaatagaactcgcagaacattatcacatggatatagaaaaggcgagaataaccgccctgttacacgattatgcgaaatactatgaagatgataaagcgagaaaaatcattgaagacgagggatttgatccacgtttattgcagtttcatcgctcgctttggcacgctccagttggcgcatatttagcagaaaaagagtttggcattactgatccagaaatcttggaagctattcgtcttcatacgacaggaagcggagcgatgtccgatttcgataaactcatctatttagcggattatacggaacctggaagaacatttcctggtgtatataaagcacgcagactagcactgaaatcacttgatgcagcaatgttgtttgctttatccaatacaataacgtatttgattaaaaagcaacaatcggtttttccagatacactggatgcctataattattttgttaatttaaatttggaaggagactattaataatttgaacagttatgatacattaatgctgaccgcaaaggcagcagacgataaaagagcagaggatatattagcactagacatgaaggggttatcaagtttcgcggattattttgttatctgccatggtaattcagacaaacaagtccaagcaattgctcgtgaaattaaagaaaaagcgcttgaaaaccaagtagatgtaaaacgtttagaaggctttgatgcggctcagtggattttaatcgatttaggagatgttattatccatgtattccacaaagaagagcgttcttactataatttagaaaaactatggggagacgcgccgctcgtggacgtttctgctgcgtttatttcttaataactaacaaaaaacaggcgggaaaaaaatccgtctgttttttttaaggagaaatcgataatgagttatgaatattttccgggattctatgatagactcatggattctgagctttatgatgaatggttggagttttcagcggactttattggtgacacatcaaaaaaagtactcgatttagcatgcggtacagctgaattcgctctacgattaagctttttaggacatcaagttactggtgtggatttgtcgaaagaaatggtggcagttgctaaagaaaaagtcgcggcagctgaaataaatctatcaattctagagcaagacatgtcaaagttagctttaaatcaaaccttcgatgtaattacatgtttctgtgattctcttaattatttagaaaccgaacaagcacttgagaatactattaaagcggtatctgatcacttaacaccaaatggcttatttttatttgatgtgcattctgtatttaaaatagatcaaggctttaaagattattcttatggtgatagcgatgaggaaatttcgataatttggaattcgtttcctggtgaatatccccattcagtcgaacatgagctaaccttttacattttaggggaggataacatgtataatcgggtcgatgaattacataaagaaaggacctatccaatcaccacatataaagaattattaaaaaaatacggtttttcgaaaattgatgtttacgctgatttcagtcatgaaaatccaacaaacagcagcgaaagaatctttttcgtagcaagaaagtaattttccaagattactttctttttttatgcgtttttgctctaaataatcgaaaaggaatttttgttcgtttggcgaataatataattaaaggcggtgaaatggatgatggaactactgaagaaacacaaaaactattttttaataggaattgccattctttgtgctggagtaatttatataagtatcccaacttctcaaacagataaggttacagcaaaccaagcgctaaatactgaagaaaaaccacaaaaagaggaaaaaaagaatgctacacatatctatattgacatcaaaggggcagtccgaactcctggtgtgtataaattaccagtagatgccagagtgcaagatgttgtgaaagtagcaggaggactcacagaagatgcggacaacagcaaattaaacttagccgaaaaactaaaagacgaaatgagtatctatgtttataaaaaaggagaagcaggatcagaggaagtagtaaaagatgatatagaatcatctgacacagacaaaaaagttaatattaatagcgcaacgaagatagacttgcaacaagtgccaggaattggagattcaaaagcaacagctattatcgaatatcgtgaaaaagaaggactgtttcagacaatagaagacttaaaaaatgttactggcataggcgaaaaaacagttgaaaaattaaaagaatatttggatgttaattaataaaagtggttgacgaacttccttataaacacctatactaatatttatcaaatcataagggagtttttaatgtgcaaagaatcgcatgggatcagttttttatggcgcaaagtcatctaatttcatcaaggagcacgtgtacaagattaatggtaggtgcaaccatagtacgtgataaacgtattattgcgggcggatataatgggtcaatagctggcggagatcactgcgcagaacatggttgttacgttgttgatggccactgtatccggactattcacgcagaaatgaatgcgattttacagtgtgctaaatttggcgcttcgacagataaagcagaattatacgtaacacatttcccttgtctcgcttgtacgaaatcaatcattcaagcaggaataaagaaagtgtatttcgctaaagactacaaaaaccatccatacgctttagaactatttaatattgctggagttgaattacaaaaagtagaatttgatgaatctgttcttcaagttaataattggaatgcagaaaaaatgcatactttagtaaaagaagcagcagtggaagtgaatatcgatccagaaaaagcagaacaactctatcaaaacatttcaaataaattgaattaaataaggagggaacgttatcgagcgatatttagctatcatcattttagctattatctgtactacttttacaagctctatcgttcccatatgtatttgtttgctcggcatcgttgcttttattaaaaaatccaaaattattcttctgtttgtcctcgtttatctcctaacttgttgttttttattttttgtggaaaaatcaaatgtgtcttcttatacagctactgaatttaacggaaattgccaaataatcaatgacttaaaagtagatggtgatagtttccaagctgtagtacgctgccagaaagaaaaattccaattgagttacaaaatatcaactgaaaaagagcaacaaaatcttaaaaagctcacttatggccaatttatttctgtatccgctaagttagagccccctcaaacaaatcgtaatcaagctcaatttaattataaagagtatcttaaaggtaaaaacattaactatatattacaagtaaatacactctatatttctggacaatctgctccgtccatactaatgcgcattcaaaatacacgtttattgataatgaatcatctaaccgaaaacatctctccaaaaataactccttatctactagcgttaatcactggtgagaaaaatggcttttcacctgaaatgtatgaagtatatcaacaaatgggcgttgttcatttattagctatatcagggcttcatgttaatttattaatcggatcaatttattttttattgttaaagctaggtataacaagggagcgagtcactatttctctccttgtattattacctttttacgttatcctcacaggagcaagtccgcctgtaattcgagcagcgacaatgactgctttacttttactttcagaaaaatatgctactaaatggagttctttttctgttatttgtatatcttttatcctgttttttataatacaacctcatgtcatttatgaagtgggttttcaactttcttatgttgtatcttttgggataattttgtcatcccgtcaaatattagtaaggcaacaaagtccttttgttaaatcattgactatttcctttatctcaacgatgatgtcttctgttgttatgatgtatcatttttactcgttttcttgggtagggattttctttaatctattatatgttccactttttacaatcattgtattaccaggttgtttaggtgtttttttactatctattatttccccaacattaatgaaaattcctgaatatatgcttacttttttgattcaattaatggaaagtttaactaatctctttgcaaagataccgcatcaaactattattactggcagaccaaacactattatgctcgtgctaattatcgctacaatactactatttttttatcagtggcaaaagaaacaatttccaatcggaatctttatttgcttttgtttattatgttatttttctagttttaatgttactggaaaggttagttttattgacgtcgggcaaggagatagcatattaatacaattaccgaaaaacaaaggcaattaccttatagatactggtggcgagcttctggtagagaaagaagcttggacaaaaaaacgaaaaccattcacaatcggtggaagtactctcacacccgttttaaaatcaaaaggaattagtagtttagataaagtcatcattacacatagcgacgcggatcacatggaagggctcgatgaactgcaaaaaaatattgccataaaagaactgatttttgcaaaaggggcagaaaataaagccattatgagagaagctcttaagactatgctaaaagtaaaacaaacgattattttagccggagcacagtggcaagttggtcaaaataaatttgaatgtttgtatccaaatgaaatgggagaaggcggaaacgatgattctattgttttaaaagcaatattggataataaaacatggattttcacaggagatttagaagcaagcggagaaaaggcgcttttagataaatcgattaagggcgatattttaaaagttgggcatcatggaagtaagacctcaacctctaaagcatttgtcgagcaagtaaaaccagcttatgcaattatttcttgtggtttaaaaaaccgttttggtcatcctcataaagaaacgatagacacgttagaggaagcagaagtaaagattttacgaactgatctacaaggagaaataatctacacatttggaaagggcttcgaaaccactttgaaataaaacttgctatctcttatttcatgttttaccatagaaagagaaataagagtgaagcgaggcgaaatgaatgctgccagaatggaaacagatacgctcaaaaaaaataactcctgtgtatttaatcatcgggacagaagattatattattaacgagacaaagcaacttttaatagataatattttagatggggaagaagtcgagtttaattatgctaatttagatttagaagaaatgccaattgaagtagtcattcaagaagccgaaagtatgccgttttttggcgataagcgcctagtaatggcaaataatccgattttcttaaccaccgaaaaaagtaaaaacaaagtagaacacgacgctgcaaagttagaagcttatttgaatgagcccgttgattattctgtattatgttttgtggcacgggtagaaaaattagatgaacgtaaaaaacttaccaaactactcaaaaaaacagccacagtaatagaagcgaaacgacctaatgaaaatgaactgaagaaatggcttgaagcaaaactaaacgaaaacaatatgcagatgtctcaagaggcgattactcggcttattgaacttacaagtggtcaattaacgacagcaatgaatgaattacaaaaacttatgttgtattgttttgacactaaagaaatcacggtgcaagacgtcgaatctttagtcgttcgttccctcgagcaaaatattttcttattgctagataagatgattgcgatggatattggtggggcacttagaatttattacgacttgttaaaacaaaaagaagaacctatcaagatattagctttaatttctagccaatttcgcttgttaaatcaattaaagttacttgagcaacaaggttattcacaacaacaagctgcatctaaattaaaagtacatccgtttcgtgtgaaattagcgtctaaacaagcaaagaatttctcagagctacaattaaatcaagctttaaaacgattggctgaaatagatcttgaaatgaaaacaggcttcggtgataaagaacagaagttagaatggtttttatttgaattacaggataatcgccaaaaaactgtataaaaaatagctttgtctccagaagacaaagctattttaaaaacaaaaaacaccacacaaggtgtgatgttttatacctaaacggtattatttagctaatttagcagctaagcgagatttgttgcgagcagcattgtttttgtgaatcaatcctttgctcacagcgctatctaattttttcgatgcttctacgtaaagatctttcgcgttgtccgcgttgtttgcagctgcttcatcaaattttttgatagcagtacgcattgcagaacgttgagatgcattacggctgttgcgagtttcagcagtttttacacgtttaattgcagatttaatatttggcattccattcacctccgtccaaactaatgaggtagtatttatttcatataacatacctttttaaattatatcagaacaaatgctattataccgaaaacacagccatattgcaataatactttctattttattttaaatttatccgtaattaataaagaagtcattgaatgttaagcgttctactgatataatcaaggatagcttgccatcggatttatgcgatgagttctaatcaggagctggggaaatgaacaaagaagaaatgaatgcaagacaaaagaaaattagaaacttttcgattatcgcgcacatagatcatggtaaatctacactcgctgatcggattttagaacaaacaggtgctttgacgcatcgtgaaatgaaaaatcagctactagattcgatggatttagaacgtgaacgcgggataaccataaaattaaatgctgtacaattaaaatataaagcaaaagacggagaaacgtatatctttcatttaatcgatacaccgggacacgtcgatttcacttatgaagtatctagaagtttagccgcatgtgaaggtgctattttagtagtagacgctgcacaaggtatcgaagcgcaaacactggcaaacgtttatttagctctagataatgatttagaaattttacctgtaattaataagattgatttgccagcagcagatccagaaagagttcgtgctgaaattgaagatgttattggcttggatgcatcagatactgtccttgcttctgcaaaatcaggcatcgggattgaagacatccttgaacaaatagttgaaaaagtaccagaaccatctggtgacgttgataaaccacttaaagcacttatttttgattctgtttttgatgcgtatcgtggcgtaatagctaatatccgtattatggatggtgttgtaaaagctggcgacagaattaagatgatgtcaaacggcaaagagtttgaagttacagaagttggtgttttctctccaaaagcaacaccacgtgatgagcttcttgttggtgacgttggttacttaacagctgcaatcaaaaatgttggagatactcgagtgggtgatacaatcacacttgcgaacaatcctgctgaagaagctcttgacggataccgcaaattaaatccaatggtttattgcggactttatccaattgactcttccaaatataacgatttacgtgatgcacttgaaaaattagaactcaatgattcagctttacaatttgaagcagagacttctcaagcattaggttttggattccgttgtggatttttaggtctactacacatggaaattattcaagaaagaattgagcgcgaatttaatatcgatttaattactacggccccaagtgttatttaccacgtgaatttaacagatggatctaatattgtggtcgataacccagctgatatgcctgaacctggcgtaattgaaagcgtggaagaaccatacgttaaagcaactgtcatggttccaaatgattatgttggtgcggtaatggaacttgcacaaaacaaacgggggaacttcattacaatggagtacttggatgatattcgcgttagtattgtgtacgaaattccactatctgaaatagtttacgacttcttcgaccaattaaaatcttctacaaaaggctatgcgtcctttgattatgaattaattggctataaagcttctaaacttgtgaaaatggatattcttttaaatgcagaaaaagtggatgcacttagctttatcgttcaccgtgattttgcctacgagcgtggaaaaatcattgtcgagaaattaaaagaacttattccaagacaacaatttgaagtacctattcaagcagcaattgcaacaaaaattgtttctcgttccactattaaagctctacgtaaaaacgtacttgctaaatgttatggtggggacgtatcgcgtaaacgaaaactcttagagaaacaaaaagaaggtaaaaaacgaatgaaacaaatcggttctgtggaagtgccgcaagaagctttcatggcaatcttgaaaatggacgaatcgaaataataacaaagattgtgctaagagcgaatatgttcatagcacaatctttttatgttaaaagcgaaacctccacatatgcactagaaaatatgttaaactgactagtggacaacgaagcaaattttaagtgcaaggaattgataaaaatgataaatacgaatctatcgagtaatgaaagttcagcggtatatatccatattccgttttgcgaacacatttgctattactgcgattttaataaagtattcttagaagggcaaccagtcgatgaatacgtagatttactaataaaagaaatggaaatgactgctgcaaaaggtcccatcgctccggttgacacggtttttgtgggcggcggaacacctacgaccttaaatgaggcgcaaattgcaagactttgcacagctatccgagaaatattaccactcaaaaatgaaattgagttttcctttgaagcaaatccaggagatctttctatatccaaattacaagcgatgcaagatcatggtgtcaatcgcattagtatgggcgttcaaagtttcaataacgagcttcttaaaaaaattggtcgcattcataccgtgaaagatgtataccaatctgttgaaaacatgcgcaaagttggttttgaaaatgtaagtattgatttgatttttagcttgccaggtcaaaccgaggctgactttaaagacactttaaaacaagcacttgatttagacttacctcactattcagcatactcactaattattgaaccaaaaacgattttttacaaccttatgcaaaaaggaaaactattcctacctggccaagatgccgaagcaaacatgtatgatttattactaacagaaatggaaaaacacggtcggaaacaatatgagattagtaatttcgcgaaagaaggctttcaaagcaaacacaatattacttactggagcaatgagcattattacgggtttggcgccggagcacatggatatgtcggcaacacccgttatagcaattttggtccaataaaaaaatacatggaaccattacaagaaaataaacttcctacattccaacaaaaagaacttaccttaaaagaaaaaatggaagaagaaatgtttttaggtcttagaaaagtagacggagttaataaaattcacttcaagcaaaaattcggtcaagatttagatacgacttttgcgcatgctattcaaaaaactactgcaaaaggctggcttgaaaataacgaagaaaatgtggcacttacaagaagcggaagatttttaggaaataatgtttttcaagaatttctctaaaaccgcatcatttgaccttttttgaccaaacaatcctactttagtctgaaatcgagtgttttcggttgactaagctagaattgtttggtaaatttatacttgtatttagcacttgacgttattgagtgctaaaagaggtgatagatatgttaacagaaagacaacttctgattttccgtgccatcatcgatcatttcacttggactattcagccggttggatcgaaaaatttgctgaaagaaaaaagtttgccttatagttcagcgactatccgtaatgagatgggtgtccttgaagaatacggttttattgaaaaaacacattcttcgtccggacgagttccttctgagaaagggtaccgcttctatgtcgattatttgctccagcccaagaagctagacaaatccgacagacaaatgattcgttctttcttttcagagaattattacgaaatggaaggactcatccaaaattcagcattaatgttatccgatttaaccaattacacgtccatcttgcttggtccagaagcaacgaaaaatcatttaagtggctttagatttgtaccaataaataattttcaggcaatgctcattttaattaccgatcaagggcatgttgataaccatcttgtgacaatacccgagggcacaacgctttctgatattgaacgaatggtcaacattttaaacgaacggttagttgggctttcactggatgatttaaaagtacaaataccaatggaagtaaaagaactacttggaaagcatgttagaaactatgaaagctttatgcatgtcttttctgattcttttgcccaggccagccagcaaaaagtgtattttggcggaaaaacgaacatcttaaatcaaccagaatttcatgatattaataaagtccgtgagatgctccatttgatggaagaagaacaagatgtatatgaattgtttagggatattcccgatggcctacaagttaaaattggccgtgaaaacaataatagtctaatggaagattgtagtatcattacagcaacatacaatattgctggcgaacgtgttggcggtattgtgctctaggtccaacaagaatggaatatagcagaatgatgggcttagttgatgtaatgagtcgagatttaaccgatgtgttaaccaaactttatcgtgataaccaaaattaggaaggctgaaaaagcataagttttttcaggaggtggctacagtgtctgagaaaaagaacaaaaaagaaaaactagctgaggaaatcgaacaagaagaattaaatagtttagatgaatcagtagaaacagtggaagaagaagcgacagaagaaactttaacagaagaacaagccaaaattttagagcttgaaaacaaactagatgaagttgaaaatcgttatcttcgcatgcaagcggattttgaaaatgtcaaaaaaagacatattgctgaccgcgatgctagccaaaaataccgttcgcaaagcctagcgcaagatttacttcctgcactagatagttttgaaaaagctcttgcaacgacttctgatcaagaagaagtgaaacaaattctaaaaggaatggaaatggtttacaaccaaattcttgttgcttttgaaaaagaaggtattgaggtaattccggctgtcggcgaacaatttgacccgaacttccatcaagccgtgatgcaagatagtgatgaaaatgcaggtagtaatgaaatcactgctgaacttcaaaaaggttataaattaaaagaccgggttattcgcccatcgatggtaaaagtgaatcaataaaaaataattactgaataacaggaggaaataacaatgagtaaaattatcggaattgacttaggaacaacaaactctgcagtagcagtattagaaggcggagaagctaaaattatccctaacccagaaggcgcacgtacaacaccttctgtcgttggtttcaaaaacggcgaacgccaagttggtgaagtagcgaaacgtgctgcaatcacaaacccaaatacaattagttctattaaacgtcacatgggtactaactataaagaaacaatcgaaggaaaagattactcaccacaagaaatcagtgcaatcattttacaatatctaaaaagctatgcagaagactaccttggtgaaactgtagataaagctgttattacagttccagcttacttcaacgatgcacaacgtcaagcaacaaaagatgctggtaaaatcgctggtcttgaagtagaacgtattatcaacgaaccaacagcagcagctcttgcttacggtatggataaaacagaaacagaccaaacaatcctagtatttgaccttggtggtggtacttttgacgtatctattcttgaattaggtgacggcgtatttgaagtacactcaactgctggtgataacgaattaggtggagatgacttcgataaaaaaatcatcgactacctagtagcagaattcaaaaaagacaatggtattgacttaagccaagataaaatggcgcttcaacgtttgaaagatgcagctgaaaaagcgaaaaaagatctttctggcgtaacaagcacacaaatctccttaccatttatcacagctggagaagctggtccacttcacttagaagtaacccttactcgtgctaaatttgatgaattaacacatgacttagttgaacgtactattgcgccaactcgtcaagcattaaaagatgcaaacctatctgcaagcgatattgaccaagtaatcttagttggtggatctactcgtatccctgcagttcaagaaacaatcaaaaaagaattaggcaaagaacctcataaaggtgtaaacccggatgaagttgtagcaatgggtgctgcaattcaaggtggcgtaatcactggtgatgtaaaagacgttgtactacttgacgtaactccattatcccttggtattgaaacaatgggtggcgttatgactacacttatcgaacgtaatacaactatcccaacatctaaatcacaaactttctctacagcagctgataaccaaccagcagtagatattcatgtacttcaaggtgaacgtccaatggcaaaagacaacaaaacattaggtcgtttccaattagcggatattccaccagcaccacgcggaattccacaaatcgaagtatcttttgacatcgataaaaatggtatcgtaacagttcgtgcaaaagatcttggaactggtaaagaacaaaacatcgttattaaatcttcttcaggcctaactgatgaagaaattgaaaaaatggttcaagacgctgaagctaatgctgaagaagataaaaagaacaaagaaaacgctgaacttcgcaacaatgcagaccaattagtattcactgtcgataaaactttgaaagaactagaaggcaaagttgaagaagaagaagtgaaaaaagcagaagcagctcgcgatgaactacaagaagcgcttaaaggcgaaaatttcgatgctatcaaagaaaaaacagatagcttatacgaaatcggtcanaacctatttgntaaatatacgaacaagctgcagcagaacaacaagcaagcaggggtgcatagggcaagaagctcctcaaaatgaacgatgagagatggctgaatttgaagaagtaaatgacgacgacaaagaaaacaaataatcttttttaaaggtaaggataatgagtcaaagtctactgtggctttggctttttatctgaaataaagtttttacaacatctctttcaaatgttacaatacgttaggactataaaaatctatcatggacaggagtgatggcggatggcaaaacgagattactatgaagtgcttggtatttccaaaagcgcctcagcggacgaaataaaaaaagcttaccggaaactgtccaaacagtatcatccggacataaataaagaagcaggcgctgatgaaaaatttaaagaaatatcagaggcttatgaagctttaagtgacccacaaaaacgtgcgcaatatgatcaatatggacacgtagatccaaaccaaggcttcggcggcggtgcaggtggtggctttggcggaggcggattctccggatttgaagacatctttgacacattcttcggtggaggaggacgtcaacaagaccctaacgcaccaagacaaggtagcgatttacaatatacaatgcgtcttaaattcaaagaggctatttttggtaaagatgcggaaatcgaaattcctcgcgaagaaaactgtgatacttgtcacggctctggcgcaaaacctggaactacaccagaaaaatgtagccattgtggaggtaaaggttctattaacgtggaacaaaataccccattcggtcgcgtagtcaataaacgcacatgtcaatactgtaatggtactggtaaagaaatcaaagaaaaatgtccaacttgtcacggtaaaggccgcgtaactaaaacgaaaaaaatcaaagtgaaagttccggctggtgtgaatgacggacaacaaatgcgcgtatctggcgaaggggaagctggtattaatggcggacctaacggcgatttatatgtagtattcgttgtgattccagatgagtttttcgaacgagaagctgacgacatttatgtggaagtgccaatcacgttcgtacaagctaccctaggtgacgaaatcgatgtaccaactgtgcacggtaaagttcgcctcaaaatccctagtggtacacaaacagggacaaccttccgcttacgaggtaaaggtgttccgcatcttcgtggaaacggaacaggtgatcaacatgtaatcgtcaaagtaatcgttccgaaaaaactagatgataaacaaaaagaaatcttacgagaatttgcttcaactacaggagacaaagtagacgaacaaacatctggattttttgacaaaatgaaacgagcttttaaaggcgattgatgaacgtagaggtcgatagttgtgcgagaagcaaccatcgaccttttctacatactaaaggagtgttgaaaaatggaatggtcagaagtagaagtccatacaacaaacgaagcagtggagccagttgcaaatgttttaacggagttcggggcagcgggagtttctattgaagatgtagcagactttttacgcgaacgagaagataaattcggtgaaatttatgcattaaaacgagaagattatccagaagatggcgttatcatcaaagcttacttcttaaaaaccacggaatttgtcgagcaaatcccagaaatcgaacaaactttgaagaaccttacaacctttgatattcctcttggtaaatttcaatttgttgtgaacgatgtagacgatgaagaatgggcaactgcttggaaaaaatactatcatcctgttcaaatcacagaccgtatcacgattgtaccaagttgggaatcttatacaccatctgctaacgaaataatcattgagctagatccaggaatggctttcggtactgggacacatccgacaacacaactttgtatccgcgcgctaagtgattatttacaaccaggtgatgaactcattgatgttggcacgggttccggtgtgttaagtattgctagcgccaaacttggagcaaaatccattttagcaacagacctcgacgaaattgctactcgagctgcagaagaaaatattcgtttaaataaaacagaaaatatcattactgtgaagcaaaataatctccttcaagatattaataaatccgatgtagatattgtcgtagccaacattttagcagaagtgattttacttttcccagaagatgtttataaagcacttaaaccaggcggaattttcattgcttcaggaattattgaagacaaagccaaagtagtagaagaagcgctgaaaaacgctgggcttatcatcgaaaaaatcgagcaacaaggggactgggttgcgatcatttccaaacgaggagtggaataaatgcaacgttattttgtaaattatgagctagaaaacgataacgatacactaagcattacaggagaaaattttcatcatattgcacgtgttatgcggatgaaagaatccgaccaagttttcattgtttttccgagcaaaaaaacttgtatcgcggctattacggcaataaatgaggaagaggtattattaaatctagtgaaatggctagaagaagataccgaattgcccattgaaatcactattgcgagcggcctaccgaaaggcgacaaactagaactcatcattcaaaaaagtacagaactcggtgcacataaattcatcccttataaagccgaacgttctgtagtgaaatgggatgataaaaaagtcatcaaaaaaatcgagcgccttcaaaaaattgcgcaagaagcggctgaacaatcgcaccggactgtcattccagaagttcattatgctgctagtttcaaagaattaatgtttgaccatgttcactatgactatgttatcgccgcatatgaagagagcgcccgagaaggcgaggatagtgtgcttactaacttattccaaacaatgaagcctggacagtctgttttgtgtatttttggaccagaaggcggcattagtgaaaaagagctgttgcttcttcaagaagtaaatgccaaacttgccggactcggcccaagaattttaagaacagaaactgctccgctctatgtattatcagctgcttctttctattttgacctttacaaaaataaaaatcgttaacatttcaaagttttatgcgaaagttaacgatttcatgttgacgatgcccgatgtttcgtatataatttttaatgagtgaatgcttatctgcattacttcagaataattcataatttattttccgttatgtcctattctggaacttaaatgaaggatttaagtgagtgcatgtaagtgccggagggagggaaagagagatgtcaaaaacagtagttcgtaaaaacgaatcgcttgaagatgctcttcgtcgctttaaacgtactgtttccaaaagtggaactttgcaagaatccagaaagcgcgaattttatgaaaaaccaagcgtaaaacgtaagaaaaaatccgaagcagcaagaaaacgcaaattctaattaaaaggcgatgatttcgttgacactgcttgacaagttaaatgaagatatgaagcaagcgatgcgcgataaagaaaaagaaaaactttccgttattcgcatgttaaaagcagctttacaaaacgaagcaattcaccaaggtgtgaaagatcttactccggatgatgaagtaaccgtgatttcccgcgaactcaaacaacgcagagattctctagccgagtttgacaaagcaggacgtagcgacctttctgataaagtccgttccgagattgtcattgttgaggactatgctcctaaacaattgactcctgaagagcttgagaacattgtgaaagcaactatcgaagaagttggcgcatctagtaaagctgatttcggcaaagtaatgtccgcaattatgcctaaagtaaaaggcaaagctgacggcggtgctgttaaccaattcgtaaaaaaatatctttcataaactaattcaaactagttttgaaaacattaaaaaacagggtttcttcatattttatgaaggaaatcctgttttttttatacatacttttggcagaaattaaagctattcatcgcttcgtttttcaagcaaggcaatttcgtgtataatataactaatcaaggcacttataacaggtgaaggggttagccaatgctaaatgaatttaatgaagtagtcgaattatctgatgacacaaacatccaagatttattcggcaataataataagaatatcgatcttttagaagaattgcttcaagtaaaaattattacacggggagaagcactttctatcactggagaagaagaagctgtccagcacactattgctgttttaaacgaacttatcttaactgtaaaacgcggcattcatattgatggccgtgatatagctcaagcagtaaaaatgcaaagaaatggcacactcatatacttccatactctttttgaagaagaaatcactaaaaacgccaaaggaacacctattagacctaaaacatttggccaaagaacttatattcaaatgataaaaaaacatgatatcgtttttggtgtcggaccagcaggaacaggaaaaacctatcttgccgttgtaatggcagtagacgcatggaaaaaaggaaaagttagcaaaatcattttgactagaccggccgttgaagcaggtgaaagcttaggttttctaccaggcgatctaaaagaaaaagtagatccttatttacgacctgtatacgacgcgctatacgatatttttggtacagagcatacaacaaggttaatggatcgtggcgttatcgagatagctcctctggcttatatgaggggacgtacactggatcatgcttttgttatcctagatgaggcgcaaaacactaccattgctcaaatgaaaatgtttttaacacgtcttggttatgactctaaaatgattgtcaacggtgatatgacacaaattgatttaccaaaaggtgcaactagtggtcttgttaacgcggaacaagttttaaaagatgttaaagacattggttttgtttactttgaacaccatgatgtagtaagacatcctttagtagctgaaattattaaagcgtacgaagggaaacaaaattagaaaggagacaaagatgtgaagctagccaagaaatggaaagattggtacatcgaaagtggaaaaaaataccttttcccacttctccttatttgttttgctgtcgtagcgtatttccttgtctgccaaatgacaaaaccggaatcgtataatgtaaagctatttcaagtagctgaaaaaacgattcgatcaccacagactgttgaagatacggagaaaacaaaagaagaacggactaaggcaagtaatgctgtagaagatgtgtatgtttacaaccgtgaaacaggacaaaatcgagtggcattaattcaaagtctattcgcttatgtaattgaagtgaattctgaagcagaagaaaatgataagaaaaataaagaaaaagcagcaaaagataaagaaccagccccagcaccaactacaacagaaactaaattaaaaaacttaaaaagtaaattatcaagcaatgtatctgaaaaaatcacttcgaatatatcagatgaagtttttactactttaattgaggctgatagcaaagattttaatgtaatggaagacgttattacaaccgaagtagcgaaaacaatggaaaataaaatccgtgatgaaaatctcaatgccgcaaagataagagcacgagatgacatcgaattgtctgctatatcttcttattacaaaaacgtatccaaagtgcttgtctcatacgcaattgtcccaaatgaaatttataatgaagaacaaactgatgaacggcgcaaagaagctgcccaatctgttgttccagtgaaaattttacaaggtcaagttatcgtgcaagaagggcaaattgtagaccgagaaacctatcgtcagttaaacatgctacatctattagatcaaaaaatgccagtcaaacaatatgctggctttgccgtttttattattgcacttgcagcacttctattcttatatacaaaaaaacaaaccatttcaaaagcaaaaaaaatgcaaacgatgctgattttttcttctgtatatgtcgtttctttattcatgttaatgattattttgtttttagaaaatcagaatatatctaatatcgcctttttattcccagcagcatttgcaccgatgatacttaaaatcttactgaatgagaagtatgcctttttaagtgtgctatatattgctgtaactagtttgtttgcatttcaaaatgattcaactagtggaattgcgattttcattttattaagtggaattacgagtgtagtagctttacgggattatagtcgacgttctgccatcatgttttcaggctttatggtaggtttaatcaatatggtatatgtcttgattttattgttagttaataatagtacgctacttcaagtgtctactttaatggcaattggttatgcctttttaggaggatttggtgcatttattctcggtgtcggagttattccgctctttgaaactatttttggtttattaactacgagccgattagtagaactagcgaatccgaatcatccactgctcaagaaaatattaatgaaagctccaggaacttatcaccacagcatgatggttgcgaatttagctgaagcatgtgcggataaaattggagcaaatagtttacttgtccgcgttggttgtttttatcatgatattggtaaaacattacgtccgccgtattttgtggagaaccaattacaaggaatcaacccgcatgataggctgacaccagagcaaagtcgtgatataattctttcgcatactaaagacggggcggaaatattaaaagaaaaccatatgcctcaaccgattattgatattgctttacaacatcacgggacaacgttacttaaatacttttattataaagctaaagaaacaaacccggatgtaaaagaagcagatttccgttatagtgggccaaaacctcaaacaaaagaaattgcgataatcaatatttctgatagtgtggaagcggctgttcgttcttcctcagaacctacaatggccaaaataacagaaattatcgacggaattattaaagatcgtttcctagatgggcaatttactgaatgcgctattaccatcaaagaaattaaaattattcgtgacactctaattgccacattgaacggaatatatcatcaacgaattcaatatcctgatgacaaagattgaaataggaggacaaaagatgacggtcttagaaatagacttactggatgaaacaaataatttaccagatgaagataaacagctagttgaaaacattctgcaatttgcagccggttatttaaaaatcgaggaaggcactgaactctctcttacatttacgacaaacgaaggcattcaagagataaatcgagagtatcgcaataaagaccaagcaacagatgttatttcgtttgcgctagaagaaatgggcgacggcgaaacagaaattgattggggagattttgacctcgagactccacgaatgctcggtgatattatcatttcaactgaaaaagcagaagaacaagcgaaagattacggacatacgaaagcaagagaattaggttttctagcagttcacggattactgcatttgcttggttatgatcatatggagcctgacgaggaaaaagtaatgtttggcttacaaaaagaagtgttggatgcttatggactcgaaagatagaaagtataaacgtagtaaaaactatgcagagtcctttcagcacgcttttaccggactgaaaactgcttttttagaagaacgaaatatgaggtttcatacatttgcggcacttgcggtagttatttgtggctttttctttcatgtgactagatctgaatggattttattaattctatctatttttggtgtattaacgttagaaatggtcaatacagcgattgaaagagccgtggatgttgcgacagagcaatacattgatgaagcgaaaaaagcaaaagatgttgctgctggtgcagtcttacttgcggcaattgtggcaagttttatcggactaattatattcataccatacttttgtcagatgtttttataaaaagaagggattgtgacttggtaaatgaaagaaaataattttatctcactcgctaaacaagcaagagaatttgcgtatgttccttactcgaaatttccagttggagcagctcttgtaacgaaagatgatgaagtcgtgttaggttgtaatatcgaaaatgcttctttcggcttaacaaactgtgctgaacggacagcaattttcaaagctgtatctgaaggaaaaagagattttaaacaattagttgtagtagcagatacagagggacctgtatcgccttgcggggcttgcagacaagttattagtgaattttgtgcgccagatatgccagtaattttaacaaacttaacaggaaaaacagcgacggtaactgtgaaagaccttttaccaggcgcattcacatcggaggatatgttatgagtgaaccatttaaatcaggatttgtcgctatagttgggcgaccgaacgttggtaaatcaactttattaaaccatattattggtcaaaaaattgcgattatgagtgataaagcgcaaacaactagaaataaagttcaaggcgtatttacaacagacgaatcacaaattattttcatcgatacaccaggaatacataaaccaaaacataaattaggcgactttatggtgaaaatcgccttaaacacatttcaagaagtagacttgatttattttgttatcgacgcttccaccggttttggccgcggggatgaatttatcattgaaaagcttaaaaacgtccaaacacctgtatttcttttaattaataaaattgacttaatttccccagaagatttaataaaacttattgaacagtaccgggaacttatggattttgaagaaataattccgatttctgcgctcgagggaaacaatgttcctaatttattagaacaaacgaatgctaaccttgaaatcggcccaatgtattatccaaaagatcaaattaccgatcacccagaacgctttattatttctgaattaattcgtgagcaagtgttacaattaacgcgtgaagaagtaccgcattctgttgctgtagttattgaaggtattgaaaaaaatcctaaaacagaaaaactaactattaatgcaactattattgtggagagaagtacacaaaaaggcattattattggtaaacaaggccaaatgcttaagcaaattggtatgcgagcaaggaaagaaattgaaagtttgctcggctccaaagtattcttagaaatttgggtaaaagttcaaaaaaattggcgtgacaaagaacattatttacatgattatggttttgaccgcgaagaatattaataaaaaagcatctggtacacaaatttgtgtaccagatgctttttatttattcagtccagctataattgtcatactctatactataaggaccaaaattatatacttcataataaagtgttaattctttcgtttcacctggctgaacatccccagtgaaactatcttcggtaatttgttgtccataatcttccgctgcatcatcgtacaacgagatatcctctgaataaaacggaagagggtcagtgcccgtattttcaaatttcactttgactttataaatatcataaccatcattcttttgagacacttcaggtttataaacagttatagtgctgtcattttctaaaacaacaggctcaccataatctacatccgtataatcattataataatcttcgtcatagctttctgcataatcattagtataaacatcggtaccactaccaccgtaaaaagaaaatggattattaaagccttgaagtaaactaactgttgctaagtttaacccagctaacaatacataaaaaccaataccaaatgataatccagcgacaataatgccggcccatctttcctttctaacaataagcaaaataattcccacaactacacctatgaatgtgagtataaacaagctgatcaataatataagtaacatatccatagaataaaaaatcctttctttcttgcctttttctctattttacaatagcaagtcgcggaaagatagcaaaaaatataaaaagacacaatcgtttagaaaatgttataataaaaagaatgaaaaaggagggttgccacatggaaaaatgcgaaggaatcgtgatacgacagacgagttatcgtgaatcagataaaatagtccgcatgtatacacgtgaatttggaaaaattggtgtggttgctcgtggcgcaaaaaaaaccaaaagtagattagctgctgtaacacaattatttacaaatggatacttcactttttttggaggaaacgggcttggtacgcttcaacaaggagaagttatcgaaaatttttcttccattcaacaagatatttttatgacggcttatgccacttatgtatgcgagttattggataaagcaaccgaagaacgccagccaaatccatatttatatgagctaacttttcaaattttacgtgacattgatgaaggatatgatccgcaaattctaacccaaatttatgaaatgaaaatgttacctgtgttaggactttacccaactatggataaatgcgctatttgcggggagacgacaggacattttgatttttcaacaagaagtaacggaattatttgccatcgctgctttgataaagaccgctaccggatgcatttaccggaaaacgtagtaaaacttttaaggctattttttatatttcaattagaccgattaggcaatattgatgtgaaacaagaaacaaaagaatggctccaaaaagctattgatacttattacgacgaatattctggtttatatttaaaaagcaggaaatttttacgtgatatggataaatgggaaaatatgttaaaaaaagatagcgatgattgactttttcgcaaaaatacagtatcttttaatatatcaactaataggtacattgaaggaaaatagtaacaaaaagctctgtttttagcgagttcgggtttggtgtgagccggatatttaactttttgtgaaggcgttctggagtacagcgaaatcaaggtgggaattgtttaaattccaaatagggtggaaccgcgagataactctcgtccctatatgctttaaatcagcatatagggacgagagtttttatattggctgaattattttggaggtggaagcaatgaatttacaaacaatgattagaacgttacaagattattggtccgaacaagattgtattatgttgcaatcgtatgatgtggaaaaaggtgctggtacaatgagcccttatactttcttaaaagcaattggtccagaaccttggaaagcaggttatgtggagccttctcgtcgtccagcagatggccgttacggagaaaacccaaacagattattccaacatcatcaatttcaagtagtgatgaaaccttctcctgacaacattcaagagctttaccttggctcattagaaaaattaggaattaacccgttagaacatgatattcgttttgtggaagataactgggaaaacccttcgttaggatgcgcaggacttggatgggaagtatggttagatgggatggaaatcactcaatttacttatttccaacaagtaggcggcttagaatgtttcccagttacatctgaaattacttatggtgtggaacgtttagcaagctatattcaagataaagaaaatgtatttgatttagaatggacagaaggtattagctatcgcgatattttcttccaagcagaattcgaaaactccaaatatgcctttgaaacttctaatacagatatgctattaactctttttgacacatatgaaagagaagcagctcgtcaaatgcaagaaggactagttttcccagcgtatgactatgtattaaaatgttcgcatacctttaacttactagatgctcgcggcgttgtttcagtaactgaacgcgctcagtatatcggtcgtatcagaaacttagcaagacgtatcgccaaaacattttatgaatcacgagaaaaacttggcttcccattagtcaaagaagagggaggaaaacgtcatgagtaaagactttttattagaaattggtttagaagaaatgccagcgaagtatgtgactagttctgtattacaactggaaaaacgagtaacagattggttaaaagacaaccaaatcgaatttaaagaaattaaaacttattctacaccaagacgtttaactgtcctagtagaagaaatggctgaagaacaagctaatcgtgtggaagaagcaaaaggccctgccaaaaaaatcgctctagacgacgaaggtaactggtcgaaagctgcattaggattcgcaaaaagtcaaaaagtagcaccagaagatttaactttccgcgaaattaaaggtgtggaatatatttacattaaaaaagaagtaatcggcgaaaaaacaaccgcgttacttccaagtctagaaaaagtagtaacaagtatgactttcccagtaagtatgcactggggtagtaatgatttacgttatattcgcccaatcaaatggcttatcgcaatgtttggcgaagaaattatcccatttgaaatcactggtgtctcaactagtaatacttcccgtggtcatcgtttcttaggaaaaacagctacaatcaatcaaccgagcgactatccacatgcattattagaacaatttgtcgttgttaatgctagtgaacgcaaacaggctattgtagaacaattacgtgaactagaaacaatggaaaattggcaaatcagagaagatgacgatttattagaagaagtaactaatcttgtcgaatatccaactgtattagcgggtaattttgaaaaagaatatttggaactacctgaagaagttctaattacgacgatgaaagaacaccaacgttacttcccagttttcagccaagaaggagaattattgcctcattttgtaaccgttcgtaatggtaaccatgaaaatctagatacagtggcacgaggaaacgaaaaagtactacgcgctcgtttgtcagatgctgatttcttctatcaagaagatttaaaaataaccattgacgaagcagttgctaaattacaaaatatcgttttccatgaaaaattaggtactttgacagaaaaaatggaacgtgtgcaaaaagtggcattgatgcttgctgattacttaaattggcaagaagaagataaacaagacattatccgcttaactaatatttataaatttgatttagtaaccaatatcgttggtgaattcccagaattacaaggtttaatgggcgaaaaatacgccttattacaaggtgaaaaaccagcaatcgcaacagccattcgcgaacattatttaccaagttcagcagaaggcgttttaccgcaaacagacctaggttcccttatcgcgattgcggataaattagaaacattaattggcttcttctgtgtaaatattgtaccaactggttctgctgatccgtttggtttacgtcgtagtgcctttggggcgatgcgcattatccaagcaaatggttgggacattccaatgcttgaagttatttctcgtattgtggacatggaacgtgcagaaggtgctactgaattaccaagtgcagatgtgaaaaaagaagtgcagaccttcttgaaaaatcgtctacgtgttattttacaagggcatcatattcgtcatgatattattgacgctgttatcggcggagatccaaatgtgattccgcaactgatagatcgtgctcaaatcttaaataaacatgcggatgcagagtggttccgtccaactatcgaagctttaacacgagtagttaaaatttctaaaaaatacgaagatggcgtagaagtggatccgaacctatttgaaaatgaatacgaacaagagctattcgataaattagaaaaactaaaatatgattatgctggtttaacaattgttgatagacttaaagcatttgctgatttacgtacaacaattgatggctatttcgataatacgctagtgatgactgataacgatgaactaaaaaacaatcgtcttgcgcttttattcgaactagcaagctttattaaagaatttgctcaaatggatgaaattaatgtaaaataaaagtaagattttgagcaaagaggaggaagtatgtatgactcaaccagccgtatacgtggtttccgattcaacaggagaaacggccgaactcgtgacaagagcagcacttagtcaatttggtcaaacaccgaagtttatccatcgttttcaccacgtcgattcttctcacatgattgaagaaattgttgacctagtggcagtgaacaatggcataatcgtgcacaccattgtactcgaaagcgtccgtgaagagcttaataaaactgctcaagctttcggcgtaccgattattgacttatttgggccgcttttaaatcagttagaagagacctacaagattaaaccactttctgaacctggccgcgttcgttcgatggatgaagcttatttcaataaagtagccgcaatcgaatttgccgtagagaatgacgatggtcgtaatccaagaggcattttgcaagcggattatgtattaattggtatttcaagaacctcaaaaactcctttatcgcaatatttggcgcttaaaggtttaaaaatcgtcaatattccaatcgttccagaagcacaaatcccagatgaactttttgaaattgaccctaaaaaaataattggtctaaaaattagtaaacaaaaattaacaaaaattagacaagagcgtttaatttcgattggtttacctggtgctggtacttatgcaagtaatcaacgaattgatgaagaattagcgatttttaataaactagccagtaaattaaattgtttcgtgttagatgtgactaataaagccattgaagagactgcaaacgagattttaatccacattggtgaaattgttgatgaaaatttagaattataagaaggacttttgctttttatggcgaatatatatattatacgggaaaaactgcttgtaaaaattagttacttcccgtataatctaaattcgcgtgtgaaaaagccaaatctacgaataatattaaaaaaacgggttaaaaactcgttttttaacttgccttcatagattttaagagaggatggaatatgtgccaaaaattttagttgatgccgatgcttgcccggtaaaagcagaaataaaacaagtcgccgaacaatttcagttagacgttatttttgtggcttcttttaaccattactctgtaaatacaaacggagaaaattggatttttgtagatactggcaaagaatcagcggatatgcgaatgatgaatttagcaaacaaaggtgatattatcgtaacgcaagatattggccttgctagcattctacttgcaaaaggtacgtatgtcttttcaaatcggggcgaactttaccgagaagaagaaatgtcattaatgttagatattcgctatagacatgccaaagaaaggcaacaaggcaaatatagcaaaggtcctaaagcaatgagcgatcaagatcgtgtgcttttcaaagaccggatgactacatttttcaaaaataagtaaataggagttgactgtcaagatggcgcggattcctgaagaagtaatagatcaagtccggaatcaagcggatatagtcgatattattggtaattatgtccaattaaaaaaacaaggtcgtaactattctggcttatgtccattccacggcgaaaaaacgccttccttctctgtatcaccagaaaaacaaatttttcattgttttggttgtggtaaaggaggaaatgtcttttcatttctaatggaacatgatgggctaacgtttgtagaatctgtcaaaaaagtcgcggatatgagtcatttagacgtcgatattgaacttccagaagaacgtgatacaagcaatttaccaaaagaaacttctgaaacagccaaaatggttgaaatgcaccaacttacagccaaactctatcattatattttgatggaaacagaagaaggggcagctgctttaacgtatttgaaggaacgaggtatgtcggaacaaatgatggcatccttccaaattggatttgcgccaaaccatcatgccacaatcacttcttttcttgaaaaaagagggatggatttgcaactggctggcacggctgggcttttatctgaacgtgatgatgggcaaatggttgaccgttttcgtaatagaattatgtttccaattacgaatgatcgtggtcaaattaatgctttttctggtcgtttgtttgaccgtgacgatggaccaaaatatttaaatagtcctgaaacacctatttttaataaaagacgaactttatttcatttttcagaggcaagacaggctattagaaaacaagaagaaatcacgcttatggaaggctttatggatgtcatttccgcagaagaagctggcgttcaaaatgcggttgcttcgatgggaacaagcttaacggaagaacatgctgatttaattaagcgccttacaaatcgtgcaattatttgttacgacggggaccgagctggaattgaagcagcgtataaagcaggaacgcttttagttgagcgtaatcgtttagatgttttcgttttgcaactcccagcaggaaaagatccagatgacttcattagagcaagtggtgcagataaattcaaagaaatctacaaacaacaacgaatgacttggacagcttttaaaatcaactatttacgcaaagaacgtaatttgcaaaacgaaacagataaaatcgcttatattgatgactgtttacgcgaaattgctaagcttgatcaagctgttgaacgagaattatacttaaagcaactagcagatgaatttgaattaactattgaaactttaaaacaacaactgcaacaatcgctaaagaacacacacaaagaacgacaaaaccatagctataatgaaccaccaatagatgattcttttatggggatgattccgcaagaagactcagagatgctcttttcctttgagcaaccaactaagaaattatctgcacacactactgcagaacagcaactcatgaaagcaatgatggaaaatcgggatagttttcttttgattaaacaacttctaggtgatacagaattttatcatgataactatcaagcactctatacctatttaattggctattttgctgaaggtaacgatgcagatccacataagtttatggatagcgtaccagatgcaggaatgaaaggacttataagcagtctagaaatggttattagtccagatgaacaaggtaaaacacagtttgaagactacattaaaagtctcaaacgttttaaattagaacaagcaaagaaagaactcgagcaacaactagcggcttttaatcgtgaaaacgacaaagaaaatgaaattcgcgtgatgcttgaaatcgtccaactcaaccgtaagttaaatagcggtcaattggattaataacgttttaaaaccgctaaatgatggtattattacctaagagaagccttttaataaggttagcggcattttggaaggaggaatacaggcagttatgagtgataaaacacaaaacacaaaaccagttgctgaacttaatgttgagcaagtaaaagaagccctgatagaagaaggtaagaaaaaggggattttaacttatgcaaaaatcgctgccagattagctccattcactttagattccgatcaaatggatgagtatttagaacatgtcggtgaagcaggcattgaagtttctgacgatgcagacgacgaggatccagatgaaacagaacttgtaaaagaagaaaccgaatcatttgatttaacagatatgagtgtgccaccaggtgttaaaattaatgacccagtgcgcatgtatctaaaagaaattggtcgagtagacttacttactgccgatgaagaaatagctttagcgaaacgcattgaagctggtgacattgaagcaaaaggtcgtcttgcagaagccaacctacgccttgtagtaagtattgcaaaacgttatgtcggtcgaggtatgttattcctagatttgattcaagaaggtaacatgggactaatgaaagccgttgaaaaattcgactttaacaaaggatttaaattcagtacctatgcaacatggtggattcgtcaagcgataacccgtgcgattgcggaccaagctagaacaatccgtattccggtgcatatggtagaaacaattaacaaattaattcgtgtgcaacgttcattgctacaagatttagggcgcgatccttcaccagaagaaattggggaagaaatggacctaccaactgaaaaagttcgggaaattctaaaaatcgctcaagaaccagtttcacttgaaacaccaatcggcgaagaagacgattcacaccttggtgattttattgaagaccaagatgcgacttcaccgtccgatcatgcagcttatgaattactaaaagaacaacttgaagatgtgcttgatacattaacagaccgggaagaaaatgttcttcgcttacgttttggtctagatgatggtcgtacgcgcactttagaagaagttggccgtgtgtttggcgtaactcgtgaacggattcgtcaaatcgaagcaaaagctttacgtaaattacgtcatccaagccgcagcaaacaattaaaagacttcctggaataatgcacaaccgggcaggaggacaaaatgttctcctgcctttttaatgaaaaggaaagcagggaatcaaatgaacgaggaacaactatcgaagcgactcgaaaaagtagcttcttacataaaaacaaacgaacgaattgctgacatcggtagcgatcacgcgtatttaccatgctttgcaatcaaaaataaaacagcttctttcgcagtcgcaggtgaagttgtcgatggaccttttaagtctgcgcaaaaacaagtacggacttctggcttaactgatcaaatcgatgtaagaaaaggaaatggtttagaggttattgaaaaagatgacaaaattgatactattgttatcgctgggatgggtggtacattaattcgtacaattttagaggaaggcgctgaaaaacttgctggagtaagcaaactgatattgcagccaaatattgcagcgtggcaacttagagaatggtccgaaaaaaataattggttaatttcttcagaagctattttgcgggaagataataaaatatatgaaatcatcgttcttgagccttctgaaaaagaaattacttggacaaaacaagaaatctttttcggtccttgcctgttaaaagaacaatcagctatatttaaaagcaaatggcgtcatgaagctaatacatggcaaaatattatccaaactatctccagtaatcaaccaatatcagatgaaaatcaagcgaaaattcgcgaattagaacataaaatctcattagtagaggatgtgctaaaatgaaagtcgcaaatggttatgaatataccgcaataatggaaaaaattgctcctaaaaaattagcaatggaaggcgatccaatcggccttcaagtaggagatttatccaaaaaagtaagaaaagttatgtttacattagatgtattagaagaagtagtggatgaagcgattgaaaaaagagtggatttaataatcgcgcaccatccgttcttataccgtccaacacaacacattgatacaacaacgaaacaaggtaaaatgatcaaaaaacttattaagcacgatattaccgtttttgctgcgcatacgaatttagatattgctcaaggcggagtgaatgatattttagctgatttactgcatttacaagatactacgatgattgaggaaacttatacagaaccttattgcaaaattgctgtttatgtcccggaaaatgaactagaatctgtccgtttagcacttgtaaataatggagcaggacaaataggcacaaattatacagaatgtactttccatacaactggaattggttcatttaaaccaggtacagacgcaaatccaactatcggcgaaaaagaaactttaacttctattcctgaagttaaaatagaagcgattttccctcaatatttaactgaaaccatcacaaaagctgtgaaaattgctcatccatatgaggaaccagcaatcgatgtatatacactcgaaacacagacttacaaagaaggacttggtcgagtcggaactttacctaaaaaaattagtatggtttcttttattgataagttgaaaacagctttcgcaattgataatgttcgttttgtcggagatttaaaagctaacgtccaaaaggtagccattattggtggggatggaaataaatttattcaccaagcaaaagctacaggcgccgatgttttcattacaggagatgtttattatcatacagctcatgatttactagctattaatttaccgactattgatgccggacataatattgaaaaagtaatgaaaggctacttgaaaaacaaaatggaagagcaagctaaaattttagattatgaagcagaatttattgtttcagaggtcaatacggatcctttccaattttgttaattaaaaacgactaatttcttttatggaaattagtcgtttttttgcgttatttctttaaaaaattctgtaattagcataatcgatttgattgttttgacaaagttgtcttatcgcgcgcacgaatgacctaatatgtgctataatggctactaggtatagaacggagtggaaatattttatgacgaagaaatcaaggtttgaccaatttggctttcaaccttttattggacttgcaatagataaattaggattctatgagccaacagaagtacaacaaaagctaatcccaggcattttaaaaggtgaaagtatcattggccaatctcaaactggtacagggaaaacccatacttttattttgccaattattaacaatgtgaatcctgaaaaagatgcagtacaagcggttattacggcaccaagtcgcgagcttgctactcaaatttataatgaaattcgcaaagtaacgaaatttagtgaaaaagaaatcgctgttcaactcgttattggtggtacggataaacaacgtgcaattgataaactgaaaaaacaaccacaaattattgttggaacaccaggtcgtattaatgacttaattcgcgaacaagccttatttgttcatactgctaaaacattagttattgacgaagcagatatgacacttgatatgggcttcttaaacgatgtcgaccatattgctggaaaaatgcctgctaatttacaaatgcttgttttttccgcgacaattccgcaaaaattaaaaccatttttaagcaaatatatggaaaatccacgttatgagcacattcaaccaaaagttgctgcttcaaaaacagtggaacatcgtattatggcaactcgtagccgtaataaacttgatttacttaaaaatgttttagttggttcacagccttatttagcgattgtttttactaatacaaaaacaactgctgatgaagtagcgaacggtttaatcgaacgtgggctaaaagtagcgaaaatccacggcgatgtaaatcctcgtgaacgtaaacggacgatgaaacaaatcgaaaacttagattatcaatatgttgttgcgacagatttagctgctcgtggtattgatattcaaggaattagtcatgttgtaaactatgaattaccagatgatctcgatttttatattcaccgtactggtcggactggacgtgcaggacattcaggtattgcacttactttatttgaaccgtcagatgaagatcgcctaaatcaacttgaaaaaatgggtatcgagtttaaacatgttgattggaaaaataaagaattcgttacactagaagaccgcaatcgccgtgcaaaacgtgaagctaaacgcgaaacagctgatccgcgcgaaatcggtatgcgtaaaaaagcaaaacaaaaaggtaagccaaattataaaaagaaaattaattataaaatgaacgaaatcaaacgtcgtgaaagacggaaaaaacgataagtgaggaatgaatttatgttaagactaggttctcatgtatcaatgagtggaaagaaaatgcttcttggcgcaagtgaagaggcagcttcttacggctcaaatacgtttatgatttatactggcgctccgcaaaatacgcgtagaaagccaattgaagagttaaatattgaagcaggcttagaacacatgaaagctcacgacatggctgacatcgtggttcatgcgccttatattatcaatattggtaactcagttaagccagaaacatttgaattaggcgttaatttcttacaatctgaaatcgaacgtacgcgtgcgcttggtgcaaaacaaatcgtacttcatcccggtgcgcatgtcggtgaaggtgcggacaaaggaattaaacaaattatccaagggcttaacgaagcattaatacacgatcaagatgtacaaatcgctttagaaacaatggctggaaaaggttctgaatgtggtcgcacttttgaagaactagcacaaattattgacggtgtgactcataatgaattattatccgttactttcgatacatgtcatacacacgatgctggttacgatattgtcaatgattttgacggagtgttaaatgaatttgataaaattatcggtattgaccgcttaaaagtgttacatatcaatgatagtaaaaatgagcgaggcgcacataaagaccgtcatgctaatattggttttggtcatatcggctttgatgcacttcactatattgttcatcatccacaattatcgaacattccaaaaatccttgaaacgccttatgtcggcgaagataaagcatcgaaaaaagcaccatacaaatgggaaatcgccatgttaagaaatggcgaatttgacccagatttattaaataaaattcaaaacagttaaaaaggagacgaaaataatgacaaaaacacttgtattcggtcataaaaatccagatacagatacgatttgttctgccattagttacgcagaattaaaaaaagcacaaggagcagatattgaagcggttcgtttaggagagcttaatagtgaaacagcttttgtacttgattatttccaagtaacagctcctcgcttagttgaaactgttgcaaatgaagtttctgaagtcgcacttgttgaccataatgaacgccaacaaagtgtggatgatattgacgatgtgacagtagttgcagtcgttgatcatcaccgcatcgctaatttcgagacatctgatccactatactaccgagctgagccagttggatgtactactacaatcctactaaaaatgttccgtgaaaatgaagtagaagtaagtaaaacagtcgcaggcttaatgctttccgcaattatttctgacacacttcttttccaatcaccaacgtgcacagaagaagataaagtggctgctgaaaaattagcactcattgcagacgttgatattcaagcatacggcatggaaatgctaaaagctggagctgatgttagcaaaaaaacagttgctgaactattacttgatgcgaaagaattcaacatgaacggtagcaaagtagaaatcgctcaaatcaatgttgtcgatgtaaacgatgtacttagccgtcgcgcagaagttgaagcacttatgacacaaaatattgtggataaaggacttgatttgtacttatttgtcatcactaatattcttactaatgactcggttggaattgctattggttccaagacagccgttgtagaagaagcatatggcgttaaatttgtggaaaatcaagcaccacttaaaggtgtcgtatctcgcaaaaaacaagttgttccaatcttaacggatacttttgctaaataattatccgaacctggaaatgctccaagctttccaggtttttttggctattttttaattcgaagtaattacgatttacattttaaccaatcttttatatactagtaaaagcggctagcaaatgctgtcaaaggagaaacatgaatgaacaaaatcatagaagtaaataatgtaagttaccattatgacaaagaacatgccttagaaaacattcattttcaagtggaaaaaggcagttttactggtttaatcggccctaacggctcaggtaaatcaactatgttaaaattaatccttggcgtactcaaaaaacaacaaggaagtatagctttatttggagaaaaacaagcagatttcaaagattgggtcaaaattggctttgtttctcaaaaatcgaatgcttttaattccgcttttcctgctactgtgaaagaagtcgttgcaagtggtttaacaaagaaaaaaggcttatttaaaacattgaataatcaagataaagaagctattgattatgctttgaagcgagttgaaatgactgattatctacatcgcaatattggcgaactttccggtggtcaacaacaacgtgtttttatcgcgcgtgcactagttagtagaccagagcttttaattttagacgagccgactgttggagtcgacgtagaaaatgtaaaagcattttatgaacttttagcagaattaaaccggacagaagaaatgacgcttttgctcgtaacgcatgatttagttgcagtgaatacgtatgttaatcatgttattagtattaataaacgaattatttttgacggttcagcccatgaataccaacattatttggccgaccgcgaacttgaaatattagcagaacaacgtagaagggaggatgcttgtcttgattgcgacgcttctccagtatgattttattcgtaatacatttatcgttggtattgttattggtgttatcgctccactgctcggaagtttcatcgtagtaagaaagctttcgttaatggcagatgcactcagtcatgtgacattaggtgggattgcggttagtttgtttttaagtaaaacttatttgccactagcagcacttaatccgttatatcttggttttggtttttccgtagttggttctttattgatggagaaattacggacggtttataaacattttgaagaactagccattccgattattatgtcggctggaatgggtttttctgttatctttatttctttagccaatggttttaatactgatttatttagttatctatttggtagtgtaagtgccgtgagtcggactgatatgattacgatcgttgttacagcaatcatcgtatttatcgttatattatccttatataaagagctatttttgttatcatttgacgaagaatatgcaaaagtttccggtttgaaagctaaaatattcgatattatttttatggttttagtcgctctagttattgcgtcttccatgcgaatcgttggtattttacttgtatcatccttaatgacattgccagttgcagcagcgattcggattgccaaaggatttaaacaaactatcttactttcaattttatttggtgaaattgcggttatcggcggtttatttacagcttattatttaaatttagctcctggtggggcaatcgtcattatttctgttttacttttaatcatcaccattttatatcaaaaaatacgtcaaaaaatattaatttcaaaacgaggtgaggaaaatgggacttacagcaactgaagcgctcatgaaaatgaaagaaaagggctataagcatactgataaacgtgaatttctaattaacttactagctcgtaaaaataaatatttaacagccaaagatgtgttagaaaatatgaaagacgattttccgggaattagttttgatacaatttaccgtaatctctccttatttgttgagttaggtatttttgaagaaacagatctttctggtgaacgaaacttccgtctggcgtgtacacatgagcatcatcaccatcattttatttgtatgaaatgtggtaaaacaaaagaaattatgatgtgcccaatggattttctaacagaagctttacctggttaccaaattgatggtcataaatttgaggtttacggcgaatgcccagaatgtttacaagcctcttaatagtaaaaaaggtccgcattcaggacctttttttattttgcagataatgttcatagttatttcatatttgtttcttattctcgacactttttatcgttaaagtaataagtagccgaaagaagaaggagaggaacagtttgacaaaattaaaaaaagtgatgatttccctagtagcagcgacactacttttactcgctgggtgcggaagtagtgcagtagtaaaaacagatgcaggaaatgtcacacaagacgagctatatgaagcgatgaaaacgacttacggtaatgaggtcgtgcaacaacttactttcaaaaaaatcttagaagataaatacactgttactgaaaaagaagtaaatgcagaatataaaaaatacgaagaacagtacggtgactcatttgaatcaaccttatcgtccaataatttaacaaaaacttctttcaaagaaaatttagagtataaccttctagttcaaaaagcaacagaagcaaatatgaatgtaagtgaaagtaaactaaaaacatactacaaaacttgggagccaaacatcactgtgcgtcatattttagtagatgatgaagcaacagccaaagaaattcaaactaaattgaaaaatggtgagaaattcgctgacttagctaaagagtactcaacagatactgcaactagcacaaatggcggactattagatccatttggtcctggtgaaatggatgaaacttttgaaaaagctgcttatgcacttaaaaataaagatgatgtaagtggaattgttaaatctacttacggctaccatctaattcaattagtgaagaaaacagaaaaaggcacttatgcaaaagaaaaagcaaacgtaaaagcagcctatataaaatctcaattaacttctgaaaatatgacagctgcccttaaaaaagaattaaaagcagctaatatcgatattaaagatagtgatttaaaagatgcatttgctgactatacaagcacttcatcttctagttcaacatccacatctaattaaagttacttcagatccaccaataaaaaaagccctttactggttttgattcccgtcaaaaacacactccagtaaagggcttttctatatgaccaaacgaataacagccattgatataattcctacaataacaatccacattaaatttttcgttaaaatagctgtaatgatagttggtaacgtggcaagtaggttttcaatattaatgctaggaaaactattttcgtttgtaataagaagactttgaacgaaaagagcagtcagtatgcataacggtacatacgataaatagcgaatcacaacactgggtagttgcagctttcgaacgaagataaaaggtaagacacgtggaataaatgtcactaaaccacagcctaaaataacgagtaacgtataattacttattgccatttttcaactatcactccaatcaaacaaccaagtaaggtagccgctaaaatggctaattctggtgtcataaaacgcataaacacgattaataaaatcgcgaccattaacataataactaaacttgtcgcgatttttttacttttatcgctaacgacttgtaaatagagcaagccgataaacattgctgataacgcaaaatcaagaccaaactgttctggatttggcaaccaattcccaatgaaagaacctaaaatacaagcggcaatccaagctatgtaggctgttacgttaattccgtgcatccattttgcgctaactggttttttattgccaatttgattcattgaaacgccaaatgtttcgtccgtcagaagcgccccaatcccaatgttattcaaaagggaatactttttaaaatgaggagcttcggccatactcatcaaaaaatgccgtgaattaattaaaaaagtagtaaaaataatagctgaaatagggctttgtaataataataatcccgaaataataaactgagcagctccagcatagacgataatagcgagtaacgttacttctaagacgcttaagtgagaagcccttccaacaacaccagcagctattccaataccagcataacctagtacagttggcaaacaagccttcacaccatcataaaaactaagttcgatttctttttccaaaaaaactcccccttaaaataaaaaactaggagccttaatgttaggctaaaagttatatattctattttcctaaaaggtcaaatcttcatgtgcgctcgttcaaagcaattgctccttttagttttaattttctaatcataccacttttctaataggaaatcatctgcattttgcacaaaaaaaccacctgcataaagcgcaagtggttaagttatcatttttctaaaatagttggttcgcttggtggaatcgagcgaattgcaaggaatacaaagatcatacttacaaccatattgatttccattccaaaaggaacaattacttgtaaagcctccataaccatcgtgaaaacagcagctaatgtaatactataagaagctatcatccagttttgacggaaagcaatacccgtccgaccgaaaccagaaagaataaatccaaataacgcataaagagctactcggaagaaaatcgatccaagcgtaaagatgaacagaacaagcaaggcaataggaataaagtatttcgctagagattcaatggacgtatataaattcactaaatcagctttattactaattccagccgtatcataacttacagattgagaaacaccagcagcagttatatagatactatccgataaaaaagcaactgcgctatcataagaagcaattttattatcaacatcatctttatctaaagttccagaggcatcaaaataaatatgtaattcatcttggtcaatagagatgggtatatttttgacagaattgtccgttaagactaattttccatctgtgactttaaaatcaggaatttcatttgtaattgtttcttcgccgactttcagcgcattttttgtcgtaacgtttgtaaaatatgctaatggaaggaaagtaacaaatgataaaacaataatgtaaacgatactttttctaattttatcatttcgaaacgaagcaatatccgcaggggaatacaaactcttccagaagcgtttaaaaatattcattcttttttcaacacctcacctaatggtttaacttttcattttcagggaaaaagatacatgtatgtgcaaaagaacgtaatttttccacctaaacttaatcatagcttgaaatgaatgcaaaatcaatattgaaacatcactgagcagaaaaattgcaagcgtttctaggtcgtggtaggctaaatggtgtaaagagaaacgttatttatggcgttaactagttctataggaataggatgtatatctttcgccttataagtaatttcttttcacgtaaaataaaaacaatacaaggaggaatttttaatgacttacgaattacctaaattaccttatacttatgatgctttggagccaaattttgataaagaaacaatggaacttcattatacaaagcaccacaatacttatgtaacaaaactaaacgaagcggtttcaggtcatcctgaacttgctgagaaacctgttgaagaattggttgctaacttagatagcgttcctgaagatattcgcggcgctgtacgtaaccacggtggcggtcatgctaaccatacattattttggtctatccttagcccaaatggtggcggcgctccaactggtgacttaaaatctgctatcgaaagcgaattcggtacatttgatgatttcaaagaaaaattcaatgcagcagctgcagcacgttttggttctggctgggcttggttagtagttaataacggtaaactggaaatcgtttctactgcaaaccaagattctccattaagcgatggaaaaactcctgttctaggcctagatgtttgggaacatgcttattaccttaaattccaaaaccgtcgtcctgaatatatcgacacattttggaatgttgttaactgggatgaagctaacaaacgctttgacgcagctaaataataatagaaaggctcacttcggtgggtctttttttatttctaatgaatttctaatgaacttacagtggaaaaatgatgttttttcagctacaatagggaaaggtattattgaaaagtgaggtaactttgcgtgaaactaaattttagaaaaaagaaaaaagattccactaagaagaaacgcgccatcattccactacgtttaaatattctattctttataatttttatattattctccgtattaattttacgacttggtattgttcaaatcgtgcaaggggatacgtacaaacgtcaattagaagaaacagataatgtgaccgtttctaagaatgttccacgtggcagtatttatgaccgaaactacaacttattagttggtaattcagcagtcaaatcgattacctacacaagaagccaacaaacagaaacttcagaaacacttcacgtagctcaaactttacaaaaattaattacaattgaaccagagaaactaaccgatcgcgatttgaaagattattggattttgacacatcaaaccgagtctttaaatcgtctatctgcaaaagaacaagcgctagaatcttctaaagcttataaaatccaagttgaaaaagtaacgaacgatgatatagctaaactaactacagaagatttaaaagtagcaacaatttataaaaaaatgacaacaggatacgcaatgactgagtccgttattaagaataaagatgtaacagatgaagaaattgcccgtgttagtgaaaacatggatagcttaccaggagttgatacaacgacagactggaatcgctattacacttatgacgaaacattacgttctattttaggttctgtttcgacagcaaaagaaggtctaccaaaagataaagctgagtactacttgtctcaaggatatagccgaaatgaccgtgttggtaaaagttatttagaagcccaatacgaaagcgttctagctggttcaaaatcccaatctgagagcgtacttgactctaaaggaaatataatcgaaacagtaagtaagtatgaaggatcaaaaggaaaagacttagttctttccgtagatgtagaattccagaaagccgtggaagatattttacgtaaaaatattaaacaaggtaaacaatatgctggttctgacttatttgatcgtgcatttgtagtcgcaatggacccatattctggagaagttctagcacttgctggtcaaaaactaaatgacaaaggcgagtttgatgactactccttaggaacattcaccactgcttatgcgatgggttccgctgtcaaaggttccacaattcttgggggcatcatggacggcgcaatttcaaacaaaacggtcttcaccgaccaaccaattgcattaaaaggaaccaaaccgaaaagttcttggtttaatagaaccggagcaggtaaccgaccactggatccagttggcgcactagaaatctcatctaactcatatatgtatcaagtggcaatgaagatgggtggcgctaagtatgttccaaatggtccactaagagctccactaagtacatttgatgatatgcgttattattacaatcaatttggtttaggcgttaaaacaggtattgatcttcctggagaacaagttggctacaaaggggacgaccaaacaattggtaaaattctcgatttcgccatcggtcagtatgattcttatacaccgcttcaaatggcgcaatacgtttcaacaatcgcaaatggaggatctagaattgcaccaagtatggtaaaagaaatccgcaatcctagtacaaatggtgattctgttggaactcttgcaaccgctaatgaaccaaaagttttaaacaaaatcggcgtttcagataatgacatcaaaacagtccaaaaaggtttttatgaagtaactcatggctcaactggtacagctagaacagtctttacatcgagtgattatgacgttgcaggtaaaacaggaacagctgatgccttctatgatggaccaaaagaaggtaacaaaatggccagtgtttggaatacaacatttgtcggttatgcaccagttaaaaaaccagaaatagcgatttctgtagtagtaccttggatttatcgtccatatggtacagaccaaaaaacaaatatgaagatttctaaagaagttttcgataaatatttcgaactgaaaaaagaacgtgctgaatccaataaagatgcttctaaagttgaacaaccaattaacaataaagaagcagctgcaaaagcacaatctgaacaaaccgaaaattaatcaaaaaaccactttcattcttgtgaaagtggttttttacatttcaaactgacaaacaattaaaaaaatggtgactaatatagataaaaaactgcgaaatggctttgtttatggtatgataaagtaagtgtaaaattaaccagatttctgttttaaagcagagatacgaggattaaattgaaggaggaattgtaaactatgacaaaaagctatcatgtcgcagttgtaggtgctactggtgcagttggtacccaaatgattgaattactagaagaggcggcgactttcaagataaagcaagtttcgttcttgtcttctattcgttctgctggaaaaaaattatccttccgtggggaagaggtaactattcaagaagctacacctgagagctttgaaggcgtagatattgccttatttagtgctggaggttccgtttctaaagcacttgcaaaagaagctgtaaaacgtggagccattgtaattgataatacgagcgcatatcgcatggatcctgaagtgccgcttgttgttccagaagtaaacgaaaaagcgctattctcacataaaggtattattgctaaccctaactgctctacaattcaaatggtagcagcactcgaaccgattcgagaagcttatggtttaaatcgaattattgtttctacttatcaagctgtgtctggctccggagtaagtgctattcaagaacttaaagacggcagcagagctcttttagataacaaagaattcacgccagaaatcatgccagtaaaaggcgataaaaagcactatccaattgcattcaatgccttaccacaaattgacgttttcacggacaatgattatacatacgaagaaatgaaaatgatcaatgaaacgaaaaaaatcatggaagacgatactattaaagtttctgctacatgcgttcgaattccagttgttagtggacattcagaaagtgtttacgttgaaatagaacaagagggagtaagtgcaaaagatattcaaaatgcattaaaaacagctcctggtgtcgttcttgaagatgatccggcaaatcaaatttatccgcaagccattcaagctgctggtaaaaaagaagtgtttgttggtcgcgttcgcgctgacattgatgattctaaaggcttccatatgtggattgtatccgacaacctacttaaaggcgctgcatggaattcgattcaaattgctgaaagcttagtcaaactagcgattatttagaggtgtaagtaatgaaaatcatagtacaaaaattcggcggcacatccgtccaaaatgaaaaaattcgtctaatggcttttaaccatataaaaaatgcccttaaagacggctataaagttgtagttgttgtgtccgcaattggtcgttacggggatccatatgcaaccgacacacttttagaacttataggagcaaaagatactaaactaactgctagagagcaagatacattgctgtctgttggagaaactatatctgcttctgtctttactaatatgttaagagaggcagacattaaagcagaagcattttcaggtggtcaagcaggtattattacatctaataatcacttaaatgcaaaaatcaccgaagtcgatacaaagcgcctaaaaaaagcgcttgaaacacttgatgtagctgttgttgctggttttcaaggaatcactgaaaacggggatataacaacacttggtcgcggtggcagtgatacttctgctgcagctcttggtgtatctttacaagcagactatattgatattttcactgacgtagacggtatgatgacggcagatccacgcattgtcgaacatgcgcgttcacttccacgagtaagttataatgaagttagtaatatggcttaccaaggagcaaaagtcattcatccgcgcgcagtagaaatagcgatgactgctaaagtaccaatgcgtatccgttcgacttacttagaaagcacaggaacacttgtcacatctttagcggatgattccggtcatttcgatgtaaaagaacgaatggtaacaggagttgcacacgttacaaatttaacgcaaatttttgtgaaaaccgatactgtaaaggcgcaacaacagacttttaaaatattagcagatgcaggaattagcctagattttattaatatatcaactgattcggtcatttttacagtcccagaagaaaaacgtcgcgtcgtcaaacaacttttagaagaagcaaacttacaaacaacggttcgtgaagactgtgcaaaagtttctatcgttggtgctggaataaccggagttcctggtgttacagcaaaaatcgtaggagcattatccgaaaaaaacatcccaattttacaatcagcggatagtcatacaactatttgggtattagtaagagaagaagacttaatttcggcagtcaatgcccttcatgacgtattttgtttggaaattaagtaaggaggaaatgaaagatggatttagggaaagtaattacagcaatggtcacgccaattcacccagaaaaaaataaagtatgcaaaaaaagaattcatcatctcgtgaatcacttaatagataacggctcagatggtttagtaatcgctggaacaactggtgaatctccaactttgtcacatgatgaaaaaatgaaattattccgccaagtggtggaaacaaatgcaggacgcgcgaaattaatcgctggcacaggttctaataatacagcagaaacgattgcttttacaaaagaagtagcagaattgggcggaattgatgctgtcttagtcgttgcgccgtattataacaagccaaatcaagatggtttatacgctcattttgttgctgttgcggaagcttctgatttaccagtagttatttataatattccaggacgtagtgttgttaatatcgaaccagaaacaattattcgtttagcaaaattaccaaatattattggtgttaaagaatcaagcggcaacttagacaatataagtaaaatcattgctgaaacttccgatgatttcctcgtatacagtggagatgacagcttaaccttgccaattttagcagttggagggaatggcgtaatttccgttgcaagtcatgtggtaggaaatgaaatgcaagaaatgatgcaagcgtatgaaagtggggacgtaaaaaaagcagcaagtatacatcgctcgttattaccattaatgaacggtcttttctctgttccaaacccagcgccaactaaatacttattaaatcaacaaggtattagcgttggacctgtaagattaccacttgtagatttgaatgctgaacaaggaacgaaattacaagctatattagaaggactttctaaatagttcaaaggaggtctacgctttgacaataaaaaaagcgaaaaacataaaaatcattccactcggcggtgtcgatgaaagtggcaaaaatttatatgtagtagaaatagacgaagatatctttatattagatgcaggcttaatgttcccagaaaacgaattactaggaattgatattgttatccctgatttcaaatatttagaagaaaacaaagacagagtgaaagccattttcttaactcatggtcatgaagatgcgattggtgcactgccatacttacttcaaaaaattaaagcacctgtttacggtactgagctaacaattgcacttgcaaagtcagcgcttaaagaacaccgcaaactacgctttaaaaatttccatgttgttgatgcagaaacaaccttatctttttctaaaattgatgtatctttcttccgtacgacgcatacaattcctgattcggttgggattgtacttgaaacaagtgaaggttccatcatttatactggtgactttaaatttgatcaatcagccaaagatggatatgcttctgatttaagtcatattgccgaatttggtgaaaaaggagtacttgctttactttcagatagttcagaagcagagcatcctggtaccacatcaagcgacagtttaattgaagaagaaattagacatgcttttagaatggcagatggtagaattattgttgcttgtgtggcttctaatttgattcgtttgcagcaagtacttgacgcatccgttgctactaagcgtaaagtcgctattgttggtaaagaattagagcgtgtatttgaaatagcaggtagcttaggtaaaatcgttattgaggaagacttgattattcctctaaaagaacttaaaaaatataatgatgaagaaatcactattattgaaacaggaaacttaggtgaaccaattcaatcattacaactaatgactaaaggtaatcaccctcaatttaatattaaaccaggagatacggtttatattacaacaacaccgtcaccatcacttgaaacgatgatggcgaaaacgatggatatgctctataaagctggagcaaaagtattaacgatgagtaataatctttttatctctggccatgcaagccaagaagatttgaaattaatgcttaacttgttaaaacctagatatttcgttcctgttcacggtgaataccggatgttaattagtcatgcgaaattagctcatgaagttggcatggcaaaatcagaagtatttattgtcggtaaaggtgaaattttagaatataaaaatgataaaatgactgctggaaaccgtgtctattctggaaatacactaattgatgggttaggtgtaggagacgttggaaacatcgtactgagagaccgtaagttactttctgaagacggtattttcatcgtagttgttacgcttaatcgtaaaactaaaacaattacttccggaccagaaatcatttcacgtggctttatctatgtgcgtgaatctgagcatttaattgaagaatcatccaaagtcgtaacaaaaatcgtcgaaaaaaacctccaagaaactggctttgaatgggctaaattaaaacaagatattcgcgatcaattaaatcgctacctatttgagcaaacaaaacgacgtccaatgatcttaccaatcattatggaagtctagtatgaactgctgcacctcgatgtgcagcagtttttttcgtttaaaagtaaaatagaggggaaaacaagctaggaaggagtgattcaattgacagaatttacatatgatgtagttataatcggaagtggtgctagtggaacaaccgtggcttttgaagcgcaggcagccggtctaaaagtagcgattgtggaagagcgtagttggggcggcacatgtgtccttagaggctgtgaccctaaaaaagtgttagtcggagcagcagaagcaagaaatctttccacaagattacgtggtaaaggtattaaagaagcagcaacaattagctggacagatttaatggcattcaaagaaacatttgtagaagatgtgcctgaaagtcgcttggaaagttttcaagaagctgggattgaaacgtttttcggaccagcaagttttcaaaacgaaaatactttgcaagttggtaacgacatactaagtgctaaaaaaatagtgattgcaaccggcgcaacaccaaatacacttaaagtagaaggtcaagaacatattcaaacgagtgatgatttcttatcacttgaaaaacttccagattcggttgtttttatcggcggtggttatatttcttttgaatttgcatcaattgcgctagctgcagggcgagatgtgcatataattcatcataatagcgaaccattaaagaaattcgatcccgattttgtagctgccttagttgctacactaaaagaagaaggcattcatttccattttgatactgatattactaaaattaataaaaatggtgaaaaacttcatatcgaaggtaaaaatggcttttcacttgaaaccgacttaattatcggagcaaccggaaggacgcccaatattgctcatttagctctagataaagcaaacatagactataccaaaaaaggcattacagtaaacgagaaactacaaacacctaaccacccacatatttatgcatgtggtgatgtagccgctacaaaaggcgctccgttaacaccagttgtcagtatggaagcagcattagtagcaaaaaatattttaggcggcaatgaaaaaatcgattatcctgccataccaagcgttgtttttactagtccaaaacttgcaagcattggcataagcatggaagaagcaaacgccaatccagaaaaatatcaaattaaaaaccatgatacaacgaactggtatacgtacagaagaacgaacgaaaaaatcgccctcgcaaaaatcatagaagaccgcgaaactggtcaaattaaaggcgctcacttcctaagtgaagaggctgattatatgataaattatatcgctatcctaatgaaagctaacttaactttggctgatttacagtctgtcatatttgcatatccatcacctgcaagtgatttaactgctttgaactagagcttaaatatgttatagtgagggagaaattcgcataaaaggagcaaattagatggaaatttggattattgccggaatatgtgcattcttaatttttatcagcggtattgttgttttatttttcccagccaagcgaaaaatcggtgcaattttaacaagcgctggaatgttattattggttggttctattattggcatcattgttagtttttcacattaccaacaagttcaaaatgatgtattcaattattcttctaaaggtacaagccaagctactgcagaagaaacaaaaacctatcaaataaactatgaagattccgcagataatattaagaaaaaaatcacctctgtcacggtcgaaaagaaagaaacctattcaacagtagaaggcaagtcagttcctggcagtatcacattacaattagaaataacaaacaatgcagctaaaactctcgaaacctatccaaaccaaggtcaacttgaagctaataaaatggatataaatggaggagacgctgttctatctgattttgaaaccacagaaatcgaacctggtaaaacagtaaaaggaacaatcgtttttccagtagaaaaattagataaagtttctgatattacttggatttcttatagtttcctaagctatttaaaagattcttcgacaccaattacaacagaaacaggtaaaatcgaacttaaataaaaaaacaatatcccggaaatgggatattgtttttttatttattcagctacattcataacttcttttaaatattcatcataagaaatttctttattataaaattgatcttttgataagttaataatacgagttgcgatagtttgtagtaactgatggtcatgcgatgcaaagatcatagcgcctttgaacgcttcaagaccattatttaatgcagtgatcgattctaagtccaagtggttagtaggttcatcaagtaaaagaacatttgaacctgaaagcatcattttggataacatacaacgaactttttctccaccagataaaacgcgtacttttttcagtacttcatcaccactgaatagcatacgtccaaggaagccgcgtaagaatgcttcactatcatcttcaggagagaactgacgtaaccattccacaagactcatgtcgttttcctcaaagaactctgagttatctttcgggaaatagctttggcttgttgtgatgccccatttatagctaccttcatcaggttccatttcaccagcaaggatttggaaaagaacggttttagcaacttcatcatcgccaactaaagcaactttgtcattacggttaatcgagaaggaaagattatcaagaatcttcacgccatcaattgttttagacaagtttgttacagttagtaggtcattcccaacttcacggtccggtttgaactgaatgaaagggtaacgacgactagaaggttgaatatcttccagcgtgattttttcgagcatttttttacgacttgttgcttgttttgatttcgatgcgttcgcactgaaacgagcaataaagtcttgtaattctttcattttttcttcttttttcttattacgatcgcccatcattgtttgtgctaattggcttgattcataccagaaatcatagtttccgacatataatttaattttgctgaaatcaagatccgcaatgtgcgtacatactttatttaagaagtgacggtcatgggatactacgataacagtattatcaaagttgattaaaaattcttccaaccagtgaatcgcacggatgtcaaggtggttggtaggctcatccagaagtaagatatctggtttaccgaataaagcttgtgcaagaagcactttcactttttctccaccagttaaatctttcattagtttgccgtgtaagtcagtagggatacctaagccatttaataaaacagcggcgtcagattctgcttcccaaccatctaattcagcaaattcgccttcaagttcagcagcgcgaataccatcttcatcactgaaatcttctttcatgtaaatggcatttttttcgtccataattttgtatagacgttcatgtcccattattacagtgttaagaacaagttcatcatcatactggaaatgatcttggcgaaggacagcgagacgctcacctgaaccaatatgaacattaccactttgagaatcaagctcgccagaaagcacttttaggaacgttgatttaccagcaccgtttgctccaataagaccataacagttacctggtaaaaatttaattgaaacatcttcaaatagctttttatcgccgtagcgtaagccaacattatttacagttaacattttcttcctccaatactaagttacttcttcttgaaatcagaaaaagcacaattgcttctattttaacatggttagttcagcaaagaaagcttacacgcataaataaatgttataattgaaaaataaggagggaagctaaatggattatcagcaaactttacaagaaaaagtcgcgctttgccttagtttgcaaggtgctaaggaaacatttccatttgattctaaaacacatgctttaacaattggcgcgaaaatatttgcgctcatccatatgtatcacggggatttatatgtcagtgttaaatgccagcctgagagaattgatttattgcgcgatgaatatatgagtataaaacccggctatcacttaaataaaaaacattggattacacttgtgattaatgaagaatatgatgtcgaagcggaaacagaatttgctttaattaaaaatagttatcagctaatttttgataaactaccaaaaaaagctcaaaacactgtaagattttctgcaaatgattaaagaaaacaaataattctttacaaaaaaacatctcatgctataatgattgttgtacgataatttcatagacgttaccacagggggggcttcttagctgagattgaatccgcgtgtttttggattctgaccctttgaacctgttcgttaatacgagcgtagggattgtggcgattgcatttctaacaatagaaactgctttcttctggggtacgtttttgaccaaaaagaagaggggagtttattttttatgcaaaacaaacgattaattattttacttgaatgtgctatctttgctgcagttgcgatggtactaagctttatcccgctggacattggttccagtttttcgatttcactaggaatgattccaatgtacgttattgcaattcgtcgcggtttttgggcggctggatttgctgggcttttatgggggttactacattttttaacagggaaagcttatattttaatgccatctcaggcaattattgaatatatcctggccttcagttttattgctttcagcggagtatttagtaaacaagttcgaagtaatttagctgctaaccaactaaaaaaagccatcgagtgggcgtggggaaccatgattattggtggtgtggctagatatttctggcattatgtagctggcgttttattttggggcgcttatgcttttcaaggttggggagcacaactattttcagcagtgatgaacggagctagctgcctcggaaccgtcgttgtttgtggaatagttatctcgatactactcaaaacaacgcctaaattattcttacctaaataaaggaaagccctgttagtaaatgctaatagggctttttagtatgttataatagaataaatactgtattacagcttgtcacaatgtccatttttacgattataagtttagcagcgatgttctttacgtgccacaagtacgaaatcatcttgtttagtaacttccgtttgaatgccacactgtctttaagctgtttttttgtatttaaaaagtttaaatcattactagttagggaaaagatttatcgattgccaatttttttggtagtggtaaagaaaaaatggaggtgtataagcgtgttaaaattcgaacacgtaacgaagacttataaagggggcaaaaaagctgttaatgatctaacacttaacatcgataaaggagaatttgtttgttttatcggtccaagtggttgtgggaaaaagacgacaatgaagatgattaatccggcttattgaacctacagaaggaaaaatatttattaatgataaagacatcatggcggaagatcccgtcaaactaagacgttctattggttatgttattcagcaaattggcttgatgccacatatgacgattagagagaatatcgtccttgtaccaaaattacttaaatggtccgaagagaaaaaacaagaacgggcgaaagaattaattaaattagttgatttgccagaagagtttttagaccgctatccttatgaattaagtggtggacaacaacaacgtatcggtgttttgcgagcgcttgcagcagaacaaaatttaattctaatggatgaaccattcggagcactggatccaattactcgggattctctacaagaagaattcaagaatttacaaaaagaacttggaaaaacaattattttcgttacccacgatatggatgaagcgattaaactcgcagaccgtatcgttattatgaaagctggcgaaatcgttcagtttgatacaccagatgaaattctacgtaacccggcaaattcatttgtagaagatttcattggtaaagaccgtctaattgaggcaaaacctgatgttacacaagtagcacaaattatgaacacgaatccagtgtctattacagcagataaatctctacaagctgccattacagtcatgaaagaaaaacgagtagatacgttacttgtagtggatgaaggtaatgtgttaaaaggatttatcgacgtagagcaaatcgatttaaatcgccgcacagcaacttctgtgatggatattatcgagaaaaatgtattttacgtgtatgaagataccttactccgtgatactgtacaacggattctaaaacgtggttataaatatattcctgtagttgacaaggacaaacgccttgttgggattgtaactcgtgccagtttagtagatattgtttatgattccatttggggaacgatagataatgtggcagaaaatcaggaggaacaagcggattccgaaacgacagaaccagaaatgaagcaggagggataagctatggacgcaattgttactttttttcaagaaaacggccataacttgcttgttcaaacatggcaacatcttttcatctccttatctgctgtaattttagggattgcagttgccgttcctgttggaattttactgacgcgttcaccaaaagtagcaaattttgttattggcgtggttagtgttcttcaaacggttccttcactcgctattttagcatttattatcccgtttcttggggtcggtacattaccagcgattattgcactgtttatttacgcacttttaccaatcctgcgtaatacttttattggagttcgaggagtcgataaaaatttaatcgaatctggtcgtggtatgggcatgacgaattggcaattaatcattaatgtcgaaatccctaactctatatcagtaattatggctggtatccgtttatcagctgtgtacgttatcgcttgggcaacgcttgcttcatatattggagctggtggacttggagactttatttttaatggcttaaacttatatcgtccagatttaattcttggcggagcaatcccagtaactattttagcccttgtagtagaattcgcgcttggaaaattagagtatcgtttaactccaaaagccatccgtgaagctcaggaagggggagaataacatgaagaaaaaatttatcgcgctattcagcgtattactactaactagttctcttttcttatctagttgctctttaccaggacttggaggcagttctaaagatacaatacgcattggagcaatggccacgacagaatcacaaatcgtttccaatattttaaaagaattaatcgaacatgacactggcctaaaagtagaaattgtaaataacctcggatcaactatcgttcagcaccaagccatgttaaatggtgatgtggatattacagcgacaagatataccggaacagacttagttgggcctcttggagaagatgctattaaagatcctgaaaaagctttagcagcagtaaaaaaaggatttgaagagcgtttccaccaaacatggtttgattcttatggctttgctaatacgtatgtgtttatggtacgccaagatactgctaaaaaatacaacttaactacagttagcgacatgcgtaaagtagaaaatgagcttactgctggggtcgataattcttggatggaacgtgaaggagatggttataaagcattttcaaaagcttatgacatcgagttcaagaaaattttcccaatgcaaatcggcttaatttataccgcacttaaaaacaatcaaatggatgtggcacttggttattcaacagacggccgtatcccaacatataacttgaaattactaaaagatgataaaaaattcttcccaccatacgatgcttcagctctagcaacagatgaaattttaaagaaacatccagaattaaaaactactatcaataagttaaaaggtaaaatctcaacagaagaaatgcaaaagcttaattatgaagcagatggcaaattaaaagaaccatccatcgtagcgcaagaattcttgcaaaaaaataattactttgaaggtaaaaactaaggaggtgccaaaagatggacacattaaaacaattaattgattattaccaaacaaatggaagttatgtcatggaagagttctggcggcatttcttaatgagtgcgtacggagttatcttcgccgcaatcatagcgataccacttggagtatatattgctaggaagaaacgcttagctggatgggttatccaaattgccaatatcattcaaactatcccagcgctcgcaatgttagctgtacttatgctaattatgggcttagggacgaatacagtcgttttatccttgttcctatattctttactcccaattctaaaaaatacctatacgggcattagaaacgttgatggggcacttcttgaatcgggtaaagcgatgggcatgacgaaatggcaagtgcttcgtctaatcgaaatgccacttgctttatcggtcattatggcaggtattcgaaatgcgctagttattgcaattggtgttgcagctatcgggacattcgttggagcaggcggcctcggtgatattatagtccgcggaaccaacgcaactaacggaaccgcaattattttagctggagccatcccaacagcagtcatggcaatattagccgatgtacttcttggatgggtcgaacgtactttaaatccagttaaaaacaaaagaaaaacattaaccgaagtcttataaaaacaatcgaaaacacaacctaccagcttcataaaaaggttgtgtttttcgtttgacaaagaatgtttcccgtagtaaactttttatcataaacgaaagaaggtcagggagcatgaaaaaggaaaaaacagaacgcacaaaacaaagctggagaaaagcacagaatgctcccagcttaagcgaagtaaataattcagtagcaattccaaaaaacgcaaagttcttccggaaattatttgcatttatgggaccaggtgctcttattgcagttggctatgttgatcctggaaactgggcgacatccattgccgggggttcggagtttggttacaccttattatctgttattttaatttctaatattttagccgttttactacaatcacttgcatcaaaattaggtatcgtgactgggcgcgatttagctcaagcatcaagcgatcatttttccaaaccgtttggctttgtcctatggattttagctgaattagccattattgcaactgatattgctgaagttatcggtagtgcgattgcacttaatttactctttggcattcctttgatttggggcgtttgtataacagcattagatatttttcttgtattatttttacaacataaaggtttccgctatatagaagttattgttattaccttaatggtgacgattcttgtatgttttggagctgaaatggtcatgtcacacccagatatgcaagctattgcgaaaggttttatcccgcaatcagaaatcgttacgaacccggcaatgctttatatcgcactcgggattcttggtgcaacagttatgccgcataatttatatttacactcatcgatcgtgcaaacaagacaatacgcgcgaacaaaagaagggaagagagaagcgattcgtttttcatttatcgattcaacgttctctttaactattgcgttattaattaatgcatctattttaattttagctgctgctgccttttatactactggacaacataacgtagctggaattgaagatgcctataaattacttaacccaacacttggaagtagcatcgccagtacggtgtttgcggtagctttacttgcttctggtcaaaattcgacattaacaggcacattagctggtcaaatcgttatggaaggtttcttaaatatccgtctaaaaccagtagtacgccgcttattaacccgtgtactagcaattgttccagcagttattattacagcactttatggagcaaatggaataaatgagttgcttattttcagccaagtaatactctccatgcaactatctttcgctgttattcccttagttatgttcacaagtgataaacagaagatgggcgaattcgttaactcaccatggttaaaaatagtgtcttggtctgttgcaatttttatcgcattcttaaatatctacttattattttacactttaacttcattataaaaagagaagattacgataattatattatgtaaacaattaaaaataattttctcatttctttccctcgaaattttcatctttatgctatataattgaattatataatactaatggcgtagtaaaggtgttgattaacgatgacggataaactattaaaacaacataaaaggcttttagaacagcaacataaactaccgtacacaatcaaactggacggcgaagttttcacaatcattatttatacaaaattaaacaaagtagctggagtcactgtagtaaactcaaaagacgaaccagcaacaatgaaagaagcagaagcagtagttaatcgcattcaaaagtataatttctattttgaatacttgggtaaacgtgctcatgtaattaaggaacgcgatagtattattgctgaaaagatagaacaaacacaattaattctaaatgataatactatttttggtgaacaaatgcagccaacgattgatgaacttaatttagcgatggaagtttataaacaacaacaacgcaaattagacgtttatcaagaagatattactttgctcaaccaaaaaattaaaatgcaaggtgaaattttagaagaagactgggaatcagctgaaaatctttccattgcgtttaccaaagctgcatatgcgcaaagtatctatttagaagcaacacgaaagaatcggaaacaattagcaaaatggttccatctccatcaaaaagaattaccaactgaaaaacaaaaagcattaggaaaaatcgtatctgttctaagtgacacgaatgctggacttgtatttgatcaaattatttcgcttagacctcttcttgaagaaggcttaatgcttgatcatgagcagtccttaacccaacgtgctgctgaatttaataaagagttcgaaacacattgtcgtttctataaacctaatattaataaagtgaaaaatttaatcagacaataacaaaaaagctaagtggcgtaaaaaccacctagcttttttctatttaataattccttgatcttgtagataatctttagctactgtataagctgatttaccatttacattcacttcatagttcattttacgcatttcatcgtctgtaattttccctgcaagtttgtttaatggtttttttagttctggatatttatctaatgttttcgtcagcataagaggtgcaccttgataaggagggaagagttgttcatcatcttctagcacttttagtttgtactgagcgagttcactatcagtcgaataagcgtccaacaggttaatgtcaccagatttaattgcattgtagcgaagttttggttccattgttttcaagttctggaaggtaagcccatatttatcctgaatgcctttatatccgtccgaacgatctttaaactctagtgtaaatcctgctttaacctgatcagctactggatttaaatcagatattttctctaatttgttttctttagcaaattcaggtgaaacagcaagcgcataagtgttattgtattccattggttttaagtatgtcatatcaaaatcttttgctaaaccatcacgtgcttgcgtgtaaactttttctggatcatgcgtttttgcgttttcttttaagaaagtttctaatacggtacctgtaaattcaggataaatatctatatcacctgattttaaagcattaaagacaaagcttgttttacccatattaggtttcacattaacttttaaatccgtctcatcttcaataactaatttgtacatattaatcaaaatttctggttctgcgcctaatttaccggcaattgtaatttcttttttatcagaagcaaaataaggaacgacaatgattgcggcagtgagtaaaattcctgctgaaatcgtaataatcgtacttttaaaggatgctttttcaagaaatcgcagtagaaagtcaaacaagattgcgagtaatgctgctggaattgcaccaagcaggattaaactattatcattgcgatcaataccaagtaaaatcaagtccccaagaccaccagcgccaattaatgcagcaagtgtcgccgtaccgataattaataccatagccgtacggataccagccataattacaggcattgcaagaggtagttgtactttgtataatcttttccatttgttcattcccattgcgcgtgaagcttcgacaagagctgggtcaacttcttttatcccagtatatgtattccgtaaaataggcaacagggcgtagattacaagcgcaataattgctggaactatcccaataccgacaagtggaattaataacccaagtaaagcaagggaggggattgtttgaaaaatagcagctacttgaataattggttcagcaagtcgtttatgtctagttaagtagatacctagaggcaaagcaatgagtacagcaataaaaagggatacgaacgaaatctgaatgtgttgtactaaggccgtgaatagctcatctttacggacagcaaatgtatctagtaatgtattcatacaagctcacccgaactttcaagatgacgcgctaaaaattgcatcacatgtttattagtaatcgtaccgataaactgaccggtttcatctttaactggaaccgattgttcttcggcaatgcggcgaactagattttcaactcgttcgttcgaggaaattcccatcgtcccgtcactagcttgataggcgtaaaacaaatcagcctctattaaatcatttactgtaaaactcgattctaaaatcggtgtattgaacgcgtgaccagaagctaagaaatctttaacaaaatcattttcaggattttttacaatttcttgtggagtagcgacttggacaatttcgccatcttgcatgacacaaatacggtctcccagtgctagagcttcttgcatatcatgggtaacaaatacgattgttttcttgattttcttttgaagtgtggaaatgtcttgttgtaaacgttggcgtgaaataggatcaagcgcgctaaaaggctcatccattaaaattattcctggatcggccgcaagtgcgcgaacaacaccaacacgctgctgctctccgccagataattcagctggcttacgatggcgataactttccgcatctaaaccaacgctatcaagcaattcggtaattcgatcatggattttttctttactccatttctttaactctggaacaatagcgatattttcttcaattgtcatgtgaggaaaaagtgctatttgctgtaagacatagccaatatcccagcggagttcatgaatatcataatcactaatacgcttttcattaatataaatggttccagttgtaagtggaatcaagcgattaatcatttttaacgttgtcgttttcccgcaaccactaggtccgatgaaaacaaagaactcgccgtcttttatgtccaaagtaacattattcactgctgtcttatcatcgctgtactttttggatacattatcaaaacgaatcattttttcatccctttcttaatttaatcgaatgtatgttctatatcatatcatttctgattttaattctcaagaacatatcatccaattaccctaaattattactatctattcctattttgataaaaaaactatggaattctttgtaaaagtgaggttccatgataaaataaaggaagtgatttttcaaaattacatcaatgaaaggtttgaaataaataatgaacaacttgcaagcacaatttcctcatatagctattaaattaaatgaacccttatctaaatatacgtatacgaaaacaggtggaaatgcagatgttttcgttatgccgaaaacaatagaagaaacgaaggaaatcgttacttattgtcatcaaaacaaattaccacttacaattcttggaaatggctctaacttaattattaaagatggtggtattcgcggagtaatcgtacacttagacttacttcaatccattgaaagaaaaaacacacaaatcatcgcaatgagtggagctaagttaattgatacagcaaaatttgcattagatgaaagtttaagcggactggaatttgcgtgcggcattccaggttcgattggcggtgcgttacatatgaatgcaggcgcttatggaggcgaaattagcgatgtccttgaagcagctactgttttgacacagtccggcgaattaaagaaattaaagcgttctgagctaaaagcagcttatcgttttagtacgattgctgaaaaaaaatatattgttttagacgcaactttttcactggaattagaagacaagaacattatccaagcgaaaatggatgaacttaccgctctaagagaagcaaaacaacctttagaatatccatcttgtgggagtgtatttaaacgtccaccaggccattttgctggtaaattaattcaagatagcggcttacaaggccatattattggcggcgctcaagtttcactaaaacatgctggttttattgttaatattggcggcgcgactgctactgattatatgaatttaattgctcatgtacaacaaacggtgcgtgaaaaatttgatgttgaattagaaacagaagttaaaattattggcgaggacaaatagccaaattaagtaggaggttatttatttttgaaagagtttaatttatttttacagaatcgaagcgtacgacgcgttggggtatttctactaattgccttcgtactttacttgcttagaagccaaatgaatattattttattaacattcattttttcttaccttattactcgactagaaaactttattttacgacgaatttcaatttatcgacaaattattgtgttgttgctttacgttttaattgcaggcgtgattgtcttcgttttcgttaaatatattcctgttttagcggatcaaataaatcaattagtgaaatttggtaatagcttcttaaaaacagatagtaataatgagtttattaactacattgttagtctagcaaatcaatttgatattatgaaatacacagaacaaggcgtttcaatgattctaacttatttgactaacgttgggacagtgttgatgaacgtatttatcgcacttatgctaagtttgtttttctcattaggaaaagatcatttgatttcgtttaccaatcaattttccactagtaagataggctttatatacgaagaagtaaaattctttggttcaaagtttgtggctacttttgggaaagtaatcgaagcacagtttatcatcgctcttgttaatgctgtacttacgacgatagcgctctggattttaggtttcccgcaattgatgactttatcgataatggtgttcttacttggattaattccagtagccggggttattatttctcttatcccgctgactatcattggttattcaatcggtggcgtagaatacattttctatattttagtagttgtcatcattatccatgcacttgaatcttatgtacttaatccaaaacttatgtcagcaaaaacaaatttaccagttttttatactttcattattcttattttcggggagcatttctttggaatttggggattaatcgttggtattccagttgtaatgttcttcttggatgttctaggcgtcacgaatcaagaagaagttaaccaaccaaaagatacaatcagtcatacgtaatgcacacgggggttcttccagattagctggaaaacccctgttttttaaagggggaaagcataatgaaacaacatctttttgtgatttcattagatgcgctaggagcacttgatttaaaggacacgtctgatttaccagttttacgagaattaatccaaacggggacacatattcaagaagtagaaacgatctatccatcacttacatatccagcacatacgagtattattactggtcattatccgaaaactcacggcattataaataacacaaaaattcaacccgagaaagattcaccagactggttttggtataaaaaagcgattcaagttcccactttatatgatttagcaaaagaaaaagggatgacaaccgcagcttttttatggccagttgcagcaaaaagtagtattgattataatattgcggaaattttcccaaatcgcttttggttaacgcaaatgatggtgtcgcttcatgctagttcaccattatttttaatcgatatggaccgaaaatttggacatttacgaaaaggcataaatcagccagagcttgatatatttttgacagcgagtgttgtagatacaataaaagccaaaaaaccaaccttacttttaacacacttagtagatatggatagtatgcgtcatgcccacggagttcattcaacagaagcaaaagccgctttaaaaagacatgacaaccgtttagctgaaattattcaggccacgaaagatgctggtatttatgaaaatacagttttcgctattttgggtgatcattatcaaatagatgtaacgcacgcaatccgcttaaatgttctctttgctgaaaaaggctggctaacagtagtagatggcaagattacagactgggaagtatatgccaaaagctgtgatggctcttgttatatttatacgaaaaatgaaaaacataaccaagaaatcgaggttttactgcaaagcatccacgaaatagaagaaattttgtcaactgaggaattaacacgtcgaggtgctgacagccaggctacttttatggtagaagggaagagtggttactactttatggatgacatagatggtccgctttacgaaaaagtgactgaggagatgcttggaaaaccaggttattacaaagcagttcatggctattctccaagtaaaccggattacaaaacaacgattatttttaacggacctggcataaaaaaaggcaaaaaaattgcaaatgcacatttagttgatgaagctccaacttttgcccgaattttaggcttacaatttccaaatactgctggtactgtaatagaagcgctattcgaatagaaaagaggggaaatacttttggcatatacaaaagaggaaaaaagctggatttttcaagattgggcgaattctgcctattctattatgattacaactgccattttaccgatttattttaaaggggtggcagcaaatgcaggaattgctgatacaacatcaactgcttactggggttatgcgaactccattggaactttgttaatttcattactcgcaccaatcctcggcacaatagcagattatcaattttttaagaaacgatttttcggcatttttacagcaatagggattgcttttactttcttacttatttttatccctacggatgcctggcttttgttacttggattttatgtgttatcgttaatcggtttttcaggggcaaatattttttatgatgcatttttaattgatgtaactaccaatgacagaatggataaggtgtcttctgcagggtatgcttatggttatttgggtagttgtattccgtttattattttcattatttttcaagcgacaggaattttacctattagtgatgtggctttagtaaatattggttttgttatgactgcattatggtggctgttttttacgattccgatgtggaaaaatgtacatcaaatccattatattccagcggtgaaaaaaccagtcagaacaagttttaagaggttatttcatacagtgagtcacattagtgaacataaaaatattgtcatcttcttaattgcgtattttttctatatagatggggtggatacgattttccggatggcgacttcttatggaattgacttaggaatttcgcaaacgacattgattttaattctcttaatgacgcaactcgtggcctttccttttacgttgttatatggctatttagctaaacgttttagtgccaaaccgcttatctttactgcaatttttgtttatattattatttgtatttatgctgtatttatgaaaacagcagttgatttttggattttagccatgttagttggaacttcacaaggagggattcaagcattaagtagatcctttttcgggaaaatcattcctaagaaacgttctaatgaattttatggtttttataatattttcggtaaattttcagcaattatgggtccggcactgatgggcgtaatcacgcaaattaccggaaagacacagtacggggtagctagcttaattgttcttttcctcgttggcggcattttatttttatttgtaaaagagaaaaacttagaaaatctttaaatccttttaagaaagtccttattttcaagtgttaagctagatgtaagatttgaaaaggaggacaccaggatgaaaaaatacttcataattcttgttttaccaatcatttctttaattgctgcagtaactatgtatttttcctggttccaaggatggctttatttttatttaaagcacgtaatggcgacagtaagtcatatgggctacattacggttggcataacggcgattttactctattttgtcgcagttcaattagtaaactggaaaataaataaagcattactcgttttttgctatataatttatttcagtattcttgtttgtttattattcggaaaagcttccgatactcaaggattttcgagtgatacttttggttttattgatacattcttggctggaaacttgcgtgttatcattgtaggaaatgtactcgcttttgttccaattggttttttattaaagaaattaggattttttactgcattactttcagcaggaatgttgatttttgcagtagaagggatgcagtatataatgcatgtggggttctttgatactggagatgtattcttaaatgtttgtggcattatgctaggatacattcttatccgttttttgtccccaagaaaatttaaacgattcaaagtaaaaccgactagctaaatgagcctagtcggtttttttgatcgttatttttttatatattgacgtttatgatcttgtattcctgttaaaataattggcgctggatcgctagcaggatcgatttcaagcgtagaaccatcttttggtaattgttctttaaatttagtttcatagtccggaatagatagcttcgtacggttagctaataattcagcatgagcctctttacgaatatattgtttatagtctggttgaagctctccatggaaaaactctccaacagccccagacccataactaaagaagccaattttatcatctgcctgtagattcgcttgattgtccagcagggaaatgaagcttaaatataacgaaccagtgtaaatattaccaacattgcggctgtaaagtgtacttaaacgataattttctaataatctttcttgtacatcacttggagccgtttcaataattgtatctaatgcctttttacccatttttgtatatggtaaatggaaacaaattgccgcaaaatcatctagtttcttaccaaatttctctgaatatttattccaaatcgtttggaaaaagtgaatatattgttctgttgaatatttaccttctacacaagcgtattcagaatacacagggcgccaaaagtccataatatcttctgtatagaatacgttatcatctaaaagcgtaatacagcgcggattagctgaaataaccattgcaactgctccagcaccttgtgttgcttctccaccagtttcaaggccataacgcgcaatatcagagccaatcacaagtactttactatcaggatgttttgcgacataatctttcgctaggttaatgcccgcagtagcaccgtaacaagcttcttttatctcaatagcacgagagaaaggttgaatcccaagcaaacggtgaatataaaccgcaccagcttttgactcatcaattccagattcagttgctaaaataaccaaatcaattttttctagatcttcttcatctaaaatttgtaaagctgcatttgcacccattgttacggaatcttgggtgataggggcaaaagccattttatcttggccaattccaatggtaaatttatttggatcaatgtttctagcttcagcaagttcagtcatatcaacataaaacgcaggagtataaaaacctattttatcaattccaattttcatatgtaagctcaagtcctttatattttatttgtaagtacttcaattttagtagaaaaatgcggaaaatacaatacattgggcttaatctagtgagtttttagcaagtttcatgatataatacgggtagattacatttaaaggagattgctatgaaagaagtagttataatagatgccgttagaacaccaattggaaaatttggtggtagtttgaaagacatcagtgcagtagaccttggtgctaccgctttaaaaggtgttttaaaaagagctaacattgctccagaacgtgtggatcaagttatttttggcaatgttttacaagcaggtctcggtcaaaacgtagcaagacaagtcgctattaaagccgggattccttataaagtaccaggtgtgacaattaatgaagtttgtggctctggtttaaaagctatcatgcttggtagacaagcaattcaactaggggaggctgacattgtagcagtaggagggaccgaaaatatgtcccaagcgccgttattacttaacccggaactagctggtgaagaaatcaacccgaaagatttaaaaaatagcatgattattgatggacttacagatgtatacggggaataccacatgggaattactgcagaaaatgtggcagaaaaatattccgtttcaagagaagaccaagataaatttgcccataattcgcaaatgaaagctgctcgtgcgcaagaaaaaaacctttttgaagaggaaatagttcctgttcaacttccagatggttcattttttgaagctgacgaaacaattcgcgctaattctactttagaaaaacttgctacgcttaagagtgtttttcaagaaggtggaactgttactgcaggtaatgcttctggtatcaatgacggggcttctgcaatcattttaatgtccaaagaaaaagctgtggcagaaaacatcccttatttagctacaattaaagtaacttcagaagtcggagtggatccagcttatatgggttatgcgccatactatgcagttaatgaagcgctagaaaaagcaggctactcaatagctgatattgatttattccatttaaatgaagcttttgcatctcaatcagttgcagttgcaagagatttaaaaatacctgaagagaaacttaatatttatggtggagcaatagcgctaggccatccaatcggtgcttcaggagctcgcattgttgtttcattgttaaatgagttacaacacgaagataaacatacaggtgtagcttccttatgtattggcggcggtattggtattgcaattatcattgaaagagtataagtagtatcatttaatcttcataaaaagctaaaatcaatcaacaacatttcaagaaaaatagcgaaataagattaaactagccttaatcacagttgtggattaaggctttttttgtttaaataagtgatggtacaatgaaaatggattatacataaaggagaattagcttaatggaatggaaacaaataaaaaacgaaaccgatattgtaaaattaatggactcattaaattattttcatgatagttgcattactggtttaacttactcaagtagcacatatgtagacgaaactgacttatcaatggtgatgggcacgaatccagtagttaaattgattattcaaagacaagcagattcattaacgaccctagaattttgtttagaaggcgttactcatttatgcatacataacgatttaaacacgtcgtcagaaatccaagaagcaaatctttactataaaaacggtaactttcattggaacgttgatgatgaaatggcaagttttaaatgtaagaaagtatcgtggagagaaattcaaaagaaatagtgaattttaagtgtaagagagtacaaatttttaatataaactgctacaataaaattgtgataaatcaaacatattgatatgagacaacaagatttacaaaaggagttgttacagtgagccgaattgacatcggagaaatacaaacctttgcgtaccaactacatacagccaatgaagcagcaagaaagagtatcaaagacatcaaaactgccgtgaaaaattataccgaagacggcagtttaaaaggaaaagcagttgatgcatcgaaaaattattaccaaatgacctatttcccattatgtgatgcgataatcgaagccatgaacgaaagcgaagaacgattagcacagtatatagctgattttcacgcccaagtggatggttctgcggatgcgaaaattgatgcggacggtttatacgaactcgggaaaatgattgatcgcatcgaagcgaaaaaaaaagcattagcccagcagatgaatactggaacggaaggacagatgcagagctatcgttcccagctgagtatcgcctacaaacaagaaaatattttagaaaaatacttggcttttgaacaaagccatggcggtttttttgataatttaaccgatttagtccgaggaattcagcagactattcgcgaactccagtcgaacattcaatttaacagtaaaaccggcacctatgatatgagcaagctgaattttaccaccgtaacccggatgcaaaaagccttaggaaaagcgctaaaaagcaacgaaacaacattcaattttgatgaatatcaaaaaacgtaccgtggtcaaatgtgggtgttaatgaaaaatggtatagtagatgttgaagcaacgaacgcgtacaatgccgctgtgcttagcggagaattaccaccagagcctaaccaaggaatagaagatgccaagttattaaaaggaatcatacaatccgtaaaagctagaagggatccactaaccggacaagaaataagcttgttgcaaggaataagtatcatagctggcatcacctttacatacacagctggagcttaccatgggaaaaggcttgcaattcctaaacttaaagatttggtgaggaagaagagtgctagcggttctgcaggtacagtctgggatgacattaagggttcacaacctccaagagaaggaactactattcctaaatcgtttgaaataaatgttaatggagagaagttatgggtgaatcccaatggaaccaaacatatggtagaatactcaactcgaaatttatctcatggacaaaaacttaccgagcaacaattgttaaggagttttcaaggtgctgtagaaaaagctacctctaatgtgataaagtttaatactaaaatagtcatagataattgggaattaatatttagtccggctagagaagcaggacaattaccagttattaaacatgctgtatatctaccttgactatgaaaggagcaaattatgaaaattaaagattatgaagataaaatagttaaagatgaagtagaagtagactattatgttccagttactgtatcattttctgaaaatgatgataaatatggactaggagaattttattattatagatttgttaacgaacatgaatcatttgttgaaattaaaatcaattctgttacacggaaagttgtagaagtagttttcacatcaatcaataatattgaagattctaatttaactattgaagagtatacagaaaaaaacccagtgatccaaatagatatttttgaagaaaattcgattataactaaagaatctgggtttaaaatatttagagggaacaaaaaaatatattttaaactggatgaagagaaggtggattctattgtaaaaatgtctagccatgtatctttatttctgaatgaagatagtgagattattggcttggatttttctagcttttcagataatgaatgggcagaacttaatgaaagtataaagtctactacttgatttaattttaaatgagagaaaaataggattttttgactgtgattttagtaacactaattcaataatttcgaagattgaattcctgtatcaacataattttaattaatagtttgatctattttcccatgtatttataagaaaatgcttattacatatatataataacaattcatatgtataataagcatttcttatataattagatgtataaatcaagagaggacagcatttctctcataatttactcctcagctttctagtttacataatatatattataggaagtaatacatattatcgcaaacaaccaataaacacttatcccaagcattcattggctatttatcagcaataactcttcaatttcttataactatcaattacaaacagctctttatcatacacattatccaataattctttcgtttgttttccagaacgtttattatactttaaagcatacagtaaaaatgataaatttaatttttcgtcacagccttcagttacatctggtcgcgcatttgtcatgtatttaaatcttcttttaactatatttgctacacacagaaacaatggaatttttatccaaataactaaatctgcatgttcgagtcttttctccaaattaaagaaataatcaccatctataatatactttttttcagaacgcagaattccgttcactttatcctcgaaatccgctttttcaactgcattccaattctccaaccaaaaaagcttatctaaatgacagacttcaaaatcataacattttccaagttttgcagcaaaagttgacttaccagcaccgttaggaccaattattaacacttttttcttgttagataatacagattgcaattcattttgtttgttcatttaaacactccttatctaagtatggctaatctaacgcatttaaagttcggtttcaagagaatcatccgctacatactccaaaatatcacctggttggcagtttaagactctacatatttcgtttagagtagaaaatcgaatggcgcttactttaccagtttttattttggataagtttacatttgctacaccaacttcttgggacagctggtttaacgatattttacggtcggccattattcgatccagcctcaatacaattgccattgtttttcgctccaatcataaagtttcgtcggattctttttgcaaagatgcgccataacgaaatatttctgttaaacaataaaaaataagtgcaaagaaaaatgacatatttagtccaaaattaatgctataaccaggtataaatacggtatgtaaaatagaataaacaatttgcggtactagtgcataaataagcattaagacagcgattctacgtaatctactaacagtaatatcattaaaaggcgtaaaattagcagctaaatctttaaaaatcatacttgctgtccataataaataggcaagtatcatactagaaaaaacggcaacaccaactaaaatccattcctccctttcaacatatgacagattattctccccaacaaaaagttccgtttgaaaataaaatatagtatcagattctagtttatttatcataacatttttgctactaaaaagcttcattaaaacggcaattatagccattatgacagaactaatcgataaaatcttaagggtaatatgtagaaaataactcattttttgcaatcgttttagtttcatgtaagtctccccctttttctagattatacataatagagagatagtgtgtcaacagatttttaacgataaacattaaataattaataattagcataaaaaaagactgaacaaaattgctcagcctgtcgtttttattcactttttattgaagtagattgttgaagtgcgaaatgtgccggttttagtttaataaagagaagtcccataccagctaaacaaatgacactggctactataaatggcattttcataccaaatgcttcactgagtaagccggaacaaagtggtgcaaatgctgcccctagccaacgtacaaagttatatgccccactagtgacgcttcttgcatatggcgagtgctccatgacagttgttgtaaacaaggcgttgtttatgcctaatattaagcctgaaataactattaaaccaatatcaacggctgtattatcaataaatcctagtaatgctaagataacagcacacgcaagtaacgatccctttaatatttgtttactattaaaacgaaattctaatgcatgagaaactttcgcagaaccaagagctaaacatagtccccaagcaaaaaatacaaaaccgatttgaatcgctgataaaccaagaacgagtggtgaataagctaaaattgtgaagaaacaataataataaaacatgccactaaatgcaatttgtaaaaatgggcgatatttaaacaaatgtaacatctgtttgatagccacttcatttttttcagtaggcgcttgaacaacttttttcggttcttttactttaaataaaatcagtaaaaatgcgataaaaattaagcaagctgtagcaaaaaatggatagcgccacgaaacatttcctaaaatacctcctaataaaggtccaaatgccatcccaaggcccatagaagcttcataaatcccaatcgcatgtcctggtgtctctgataaagcaattaacattgtcatcgctgtagccatgaacattgaattaccaaagccccagccagcacgaaaaatggataaagcgccaattgtatctgataaaccacataataatgcaaaaatagttacgataaatagtccgataacgattaattttttgtcacccaatttacctgcgacaataccaattggaatcatcataatcgccattgtaaaaatataagcagtgaataacatttctacttgtgaatgggatgcgccaatactttctgcaatagaaggtaaaagtggatccacaactccaatccccataaaagcaagcaaactagctgctgcagttatccatttccccgtgttcatttccttgtctgtcatcataatacaactacacttccctttccaaaataaaactcaactattatattacgcttgataaataccaatgtcaatatttacatatataatttattacatatctaacgattttacttattgatgtttatcgcttacaataaggttaaatagaaatttagaggtgctactttatgatacccaatgtattagaatatactttattacaaatgatagctcgtgaagcatcgagtggctacgagctagcaaatcgacttagaatcttgcaaaatacacatcacagccaaatctacccttcattatctaagttagaaaaggcaggatttttagtagttcataaacattcacagaataaaaagcccgataaaaaggtctacactattacacaatctggcttagattccctacttgaatggtcagaaactccacttaaaatccctgtaacaagagatgaattcaccacaaaagttcaactagattggttaaataacactcgaacaaaaggacttattcaagaacgagaaacttacttaaaagaacagttaggtctaattgaagaaacgctcgaccatttcgctaaattatttgatttaaaaaccaaacaagacaagctaaaaaacatgtcctatcaagtctatgcaaggcgattagatttgattcaaaccgaattaaaatggtgtgaggaaatgtataaaatactataaaaaaaccggcgaacatagtattcgccggttttcactatttataactactagtttctaagattttatttgcaagtgctaccacttcttcttctggagcttcgataccttctaatggataacgaatgcccatttccttccatttgtaaacacccatcgtatggtatggaagcacatccacttgttttacatttggaagagtttgaataaattcgtgtagctttgttaaatcttctgggtcgtctgttttagttggaattagcacgtgtctaatccaaattggttgctctttatcgcgtaaatagtgagcaaaatcgataattggtgcgttggatttcgtagttagttttaaatgtttttctggattgatttgtttaatatcaagtaaaattaaatctgttacttccatcaaacgatccaatttctcgataaactcaggatcgcgagtgaaacagccaccacaagagtcgatagttgtatgcactcctgctgctttacatagcgtgaaaaactcaattaggaaatctacttgaagtaatggttcaccgccactaactgtaacgccaccacctgatgcatcccaaaactctttatacttaatcgcttcgtcaaatacatcttgagccgaacgttctgtgcctgtaccaatcttccaagtatcgggattatgacaaaattggcaacgaagtaaacacccctgcataaaaacaataaaacggatacctggaccgtccactgttcccattgtttctactgaatgaactcttcctaaaacctctgtcataattctcctcttcctttcctaaataacaaggattgctactggtgagcaatccttgttgaagcgttctcgccttaatattacatagattcgtgcattgtacggtgaataacatctaattgttgttcacgagttaatttgatgaagttaactgcatatccagaaacacggatagttagctgaggatattcttctggatgatccatcgcatcaagtaatgtatcacgattgaatacgttgatgtttaagtgatgtcccatttttgtggaataaccatcaagcatagcaactaagttattgatttgcgattcatcttcgcgacctaaagcttttggtacgatagagaatgtgttagaaataccatcttggccatattcgtaaggaagtttagctacggaagatagagaagctaaagcacctttagtatcacggccatgcattgggttcgcacctggtgcaaatggttcgccagcacgacgtccgtctggtgtgttaccagttttcttaccataaaccacgttagaagtgattgtaagaacagaagttgtgtgaactgcatcacggtaagttttatgttttctaactttagtcatgaatgtttttagaagttctacagcaatttcgtctacacggtcatcattgtttccgtatttaggatagtcgccttcgatttcataatcaaccacgatgccgtcttcgtcacggattggacgaacagtagcatatttaatagcagataaggagtcagctgcaacagaaagtccagcgataccagttgccattgtacgtaatacttctgtatcgtgtaaagccatttcgatacgttcgtaagcatatttatcatgcatatagtgaataacatttaatgtattaaggtaaagttctgcaatccattccatcattgcatcatatttttccattacttctttgtagtctaatacgtcgccttcaactggacgataagcaggtccaacttgtgctttagatttttcatcgacaccaccattgattgcataaagaagtgttttagcaaggttggcacgagcaccaaagaattgcatttgtttaccaacgcgcattgcggatacacaacatgcgatcgcatagtcgtctccccatttagggcgcataacatcgtcattttcgtattgaatagcagatgttttgatagacattttagcacagaatttcttgaatcctgatggtaaatgagtggaccaaagtacagttaagtttggttctggagctggtcctaagttatctaatgtgtgtaagaaacggaatgagtttttcgttacaagtggaacgccttcttccgtaataccaccgatggattcagtaacccaagttggatctccagagaataattcattgtaatctggtgtacgagcaaattttacaagacgtaatttcatgatgaagtggtcaacaatttcttgtgcttcttcttcagtaattagaccattgcgaaggtcacgttctacataaatatcaaggaatgtagatgtacgtcctaagctcattgcagcaccattttgttctttaatagcagctaggtaaccaaggtataaccattggaaagcttcttgagcagttttagctgggcgaccaagatcgaaaccatgtttttcgcctagtacttttaattcgccaagagcacgaatttgttcgttaagttcttcacgttgacggataacgtcatcgctcattgtacgtaaacctgtattgtttaaatcttgtttcttttgtttaattaagaagtcaactccgtatagtgcaacacgacggtagtcaccaataatacgtccacggccataagcatctggaagaccagtgattacgcctgatttacgagctgcgcgcatttcagcagtataagcatcaaatacaccttggttatgtgttttacggtattcagaaaaaatatgactaatttcttcgtctactttaaaaccataagattcagctgctacttctgccatacggattccaccgaatggttgtaaagcgcgtttgaaaggtacgtcagtttgaacaccgacaactttttctaagtctttgtttaagtaacctgggtcatgtgaagtaatggttgaaacgattttggtatccatatctagtacgccaccgttttcacgttcttgtttagttaagtccattacttgatcccaaagttttgttgttgcttcggttgggccaactaagaatgtgtcgtcaccgtcatataagcgatagttttttaagataaagtcacgtacatctacttcttgttgccagttaccacctgcgaattcataccattgttcagtcatcatataacctccatttattgttcaatctcgagcgtgcttttttgagcaaactaatttataaataatctacactgttatcataacatattctacaaaaaatgctacagttttgtgcaatatttttcaaacttttttatgaattttatgtgactttttctttcaaaatagccaagaacgctaatttaatgcgttttaaccactttatcattattctaattttgttttaattttaatttcttatatttcctgtaccacttcaaacacccactcctgttatggtacagttttaatttcattcatttgtataaaacagttggaaaacgcttaatctattgcgcaccaatgcttttaccgtttatgtagcgttttcattgtttttcatgaaaatagctaagccgtttttacaactacgacttagctacttttcaccataaatatttattcgatgtggtaacagcaattgcaccactagcaattacttgatccacttgttgtgttgtttcgattaatcctcccgcaatcactggaatgtgaagcttttgggtcatcttttgtacttgttctggaatgatgccgggtaaaagttcaatgcaatcaggttggaccttctgaattaaagccactcctttgttataagcgctagaatctatcataaataaacgctgaatggcaagcattttatgttgttttgctttcataatcgcatttcctcttgtagaaataatgccatctgggcgaatttctttacataaaaagtcaattgcatagtcatcattttttaaaccattgactaaatcagcatgtagcaaaacttttttcccgccagcttgtgcgtattttactaaagctttaagctgagcaacatgagtctcgagcatcaccatataagtcaaatcaagttctaatatcttttccatgtctttttgattatgtgcagctgggatgattgattgaccagaaaatggtaactccaattgtattcctcctcctcttctacatgacacgtttaaacattttttccagttcgtaagttgaatattgaataataactgggcgaccatgaggacaagtgaatggatcgcttgcttctctaagtgtatcaagaagtgcttccatatcttgcatagttaaatagtgatttgctttaattgattttttacaactcatcataatcgcggtatcttctcttaatttatgaatacttatacttggtgctgacaaggcttcatcgataatttcgcggagcatttcctcttcttggtcttttgggaaccaggttggatgtgcgcgaataataaagctgttttgtccgaagttttcaagaaaaacaccaacttcttctagtttcgctttttgttcttctagtcggacatattcatctgatgggaattctaacacgataggcacgagtaattcttgcaattctcgacttacttctccaattttttcacgatagaattcatatttaattcgttcttgcgcggcatgctgatcaataatatatagaccattttcattttgagcgaaaatatacgtcgcatgcatttgtccgattggatacattttcggaatacgttctttttgctcttctacttgttcaggctgcgtttccggattataagtaggcatcgtttctaaaataaagtcgtcttcttttggtactatttcatcagatggtacgtattcaggaatatttggttttgagaaaagcgtcggcggttcttttggctgtctgttttcttcaaatgacatctgaatttgttcggatttttgttgttctttttgtttttttgaaacttctccatctggaattaattgcaactgatgaaatgcgtctttaatcatctgactaatgagctggccaagttctttttctttacttaaacgtacttcaagttttgctggatgaacgttgacatctacaataattgggtccatttcgatttgtagcacgattattggaaaacgaccaattggtaaaagtgtatggtacccttcttgtatcgcttttactagtgcgaagtttttgataaaacggccattaataatcgttgaaatgtaattacggttggaacgatttacttctggcaatacggcataacctgaaattttaaaatcaagcgactctgccttaactggaatcgattttctagcgatagacacgccataaatagctgcgatcacttgacgtaaatcgccatttccatttgtttgaagcaaaggtttcccattgtgcgaaaaccggaaactaatatctggatgagctaaagcaagacgatttaaaatatcggtaatatttccaagttcagttggtaagctttttaaatattttaatcttgctggagtattaaagaacaattgcgatacttcgatttgcgttccttttcgggcgtgaccacttttttgttcaatgatttttccgccttcaagagagatagtagttccttttgtttcacctgtagaagtttctaatgttaaatgagatacagacgcaatactaggaagtgcttctccgcgaaaccctaaagtatgaacacgaaatagatcagcttcgtttttaattttactcgtagcatggcgcaaaaaggctattgcaacgtcttcttcctcaataccactaccgttatcaataattgtaatcttatttaatcccgcttcttccaccaaaatatcaattactgtgctccctgcatcaatcgcattttcgactaattctttaacgacagaagcaggtcgttctactacttctccggcagctattttattggataaagcatcggttaattccactatatgtttagccatttaaaacccgcctttctgtttaatgaattttactttggagttcgtataatttgttcatcgcatccattggcgtcatctgcataatattcatggcggcaatttcttttaatagttttgtttctttagaagatgctttttcctctggttctaccgggaacattgatagttgtacttcttcgtgaatttcttctggttgtttatcttgggtaataattatttttttatcattactttctaactgctctaaaatgcggcttgctcgttcaatcaaggatttaggtagttctgctaattcagcaacatgaataccataacttttgtctgctggtccttctttaattttatgaagaaataccactttcccattctcttcaacagcactcacatggatgttttgtaatccacgtaattctttctcaagatctgttaattcatggtaatgagtggagaatagtgttttagcatgaacgttttcgtgaatatactcgataattgcctgagcaagcgccataccatcataagtagcagttccacgaccgatttcatcaaataaaatcaaactatcttttgtagcatggacaatagcatttctagcttctagcatttctaccataaaggtactttggccagctattaaatcgtctgctgccccaattctagtaaaaatttggtcgaaaattggtagagttgcttcttcggcgggaacaaaacatcctacttgagcacatatcgctgttagagcaacttgacgcatatacgtacttttacctgacatattggggcccgttataagcaaaatttctctattttgatctaaatcgcaatcattagcgacataactttgcgcacccattactttttctacaacaggatggcgaccttgtttaacgtgcagtgacccgtcttcacttaaggtagggcgaatgaaatgatttttctcactaatatctgcaaaactttgtaaacaatcgatttcacttacagacttcgctaatttttggaggcgttctatgtagtcttttaccatttcgcgtacttctgtaaatagttgatattctaattccatacttttttcttctgcatctaaaatgagtttttctttttcttttagttctggagtaatataacgttctgcattagctagtgtttgcttgcgttcatagcggccttctgggagcagatgcgtgttcgcccgggtaacttcaatatagtagccaaatacgcggttaaagcctaccttcatcgttttaattccagttagttcgcgctcttttcgctctaattctgcaatccatgtttttccgttccgacttgcatcacgatacgtatcaagttgactattgtaaccatctttaattattccaccttcgcgaatggaaatcggtgcggagtcaacaattgcttcttctagtttttccgttagttcttcacatggatctaattgattagcaagtgctgttaaactcttactattcattgataataacgtcgctcggatacgaggtatttggtataacgagttgcgcagttgaattaaatcacgcgcatttacatttccataagcaactcgaccagcaagacgttctaagtcataaacgttttttaggttttctactaattccagacgctcaaaaaagtgagccattagttcactgacatcatcttgacgttcaataatttgcttacgatcaattaacgggcgatcaatccattgttttagcattcttccgcccatagccgtttgtgtattatctaatagccacagtagcgttccttggcgccctttacctcgaatggattctgctaattctaaattacgtttcgaatagtaatccattttcatgtagttactagtttcatagtgtattgcttgttgcaggtgacctaagtcccgcttttgggtttcttttaaatagtggagtaatttacctatagctcgtttttctgagagcgacatatggcgcgtaactaatttttcgttttccgctgggatagtatcttcttcatgaaccgaaaaagttaaaccaagttgttctttcatcacgtcagaaagaacttctttttctgattcggaaacgattaattctctagttgaaagggttgttaactcattaattaagcggtcttcgctagcttcaataaccgttgattttaattcaccagtagataaatcagagtaagcaaaaccgtattcctttccttcgtaacagtaaagtgaggcaatatagttattttctttcgcctttaatcctcgttcatccatgacggttccaggtgaaattaactgcactacttctcgttttaccatgcctttcgttgttttaggatcttctacttgctcacaaatagctactttatatcccttttcaattaacgtatcaatgtaaccgctcgctgaatgataaggaactccgcacatagggattttctcctttgttccaccttcgcgaccagtcaatgtaatttctaaaatttgagaagcattgagtgcatcctcaaaaaacatttcataaaaatctcctaaacggaaaaataagaaagcatcttgatatttgtctttgatttctaagtattgcttaatcattggtgtatattctgtcattatctcatcatcccttacttcattttcatcctttcattatagcataaagttacattttcccgcgacctcaaaagaaaaaaactgccagtagtttggcagttttaaatggttaattttctttttcaagctcagttgttacttttgtagtaatctccgttgtaatggattgtaaaagatcgttagcgtcttcttgagcgcgtctgaattctgtcacaattggaagcgaatcaatatccgcacgcacattatcaatttgactttcggtttgtttcattgcttctaatttttgataatgttctaagttcactgcttctttttgcagtaactttattttagaaactttcgcggctacttttgaattagcgtttattctctcctcagctaagcggtagaatgatacttcttctgtttgttgtaaagcatcccgaagttccgttgcttttttcatgatttcttcttttgaaactgtcacaattacatctccattcttaatcaaaggaaaatgggtggtcttcattgatgagaattcggtcaattttttgagctttcccggttgtttcgtctaaggtgattaggcaaccagataaaactgctcgacctgttttagggacttcaaatcttgttggcaaggctgttttaaaacgacgaataacagcttctttttccattccaaggatagcgtcatatggtcctgtcatacctgtatcagtcaaatacgcagtaccttctggaagaatacggttatcagaagtttgtacatgtgtgtgagtaccaactaccgcagtaactcgcccgtctaaataccaacccattgcttctttttcgctagttgtttcagcatgaaaatcgacaaaaattatatttgttcgtttctttgcttcttctattaatgcatccattttgcggaatggatcgtctaaatctgctaagaaagttcggccttgcatgttgataacggcaatttcatgttgattactttttacaaaaaccatgcctgttccgggtgttgtatcatctgggaagtttgctgggcgaacgagatatttagcgtcatcaataaattcaaaaatatcgcgattatcccatgtgtgattacctagagttacggcatttgcaccaagctccagaaaatccttataaatcttctccgtgattcctctgccacttgcagcattttctccatttataattgtgacagtaggtttatattttttctttaattgtggtaaatattctgtaatggcgtcgcgaccgattgagccaacaacgtcaccaataaataataatttcatttcgttattctccgtttctattacttctacgttctaataatgcgacatctcgaaaaacgccattcatttcaccgagtttttcgtggatgcataaagtttggaagccgtatgtatgatgaagtataatactcgcttcattttccggaaaaattaaagattgcaaagtccagaagccgttttgctcacttgtttgaataattgcttgcataagagcttttccgatgccttttcctcgagcgctttttgctatataaatacttaattcagctactccgcgataagcatgcatacttgaaaatggcaataacgctgcccaaccaatcacttgaccctccgttaaaaccactaagcggcaagtttttaagtacttctcatcccaagcttcaaaagatagcgtctttcttgaaagtagcgtttccggtatctataccttcttgatgcactctagctacaccagaataatgttcttttagcatcggcaaaattttccactcacccaaaaactccgcctcccttttttcatctatcctttgattataccgttcttaatcaagctaggcaaccgattaaaaaaagatacatcacaaaataaatttgcgatgtatcttttaaatattatttagcgtattcaactgctcttgtttcacgaattacagtcactttgatatgaccaggataatctaattcctcttcaattcgttttcttatgtcacgagcaagtcggtaggaagatagatcatcaattgtatctggttcaacgatgatacgtacttcacgtcccgcttggatagcataagatttttctacaccatcgtaagactcagaaatttcttctaatttttctaaacgacgaatgtaattttcaagcgtttcactacgagctcctggtcttgcagctgaaagtgcatccgctgctgcaaccaataccgcgataacagaagtagcttctgtatcaccatgatgggaagcaatactattgattaccacatcattttctttgtatttagtagcaagttctacgccgatttcaacgtgacttccttcaatttcatggtcaattgctttcccaatatcatgaagtagtccggcccgtttagcaagcgtaacgtcttcgccaagctctcctgctagaattccagcaagtttcgaaacttcgagtgagtggttaagaacgttttgtccataactagtacggtaacgcaagcggccaagaatttttatcaaatcaggatggatggaatgaattccaacttcaaatgtagcttgttccccgacttcacgaatgtgttcgtccacctctttacgggctttgtccaccatttcttcaattcgagctggatggattcttccatcttgaacaagtttttctaaggcgattctagcgatttcacgtcgaattggatcaaatccggaaagtataactgcttccggggtatcatcaattatcaaatcaatccctgttagcgtttctagcgtacggatattacgtccttcacggccgataatccgtcctttcatctcatcatttggtaaggtaacaacagataccgttgtttctgccacatgatcagctgcacaacgctggatagctagtgagagaatattctttgcttttttatccgactcttccttggcccggttttctgattctttgaccatgattgctgtatcatgtgttaattcctcttctacctggttaaggatgatagatttcgcttcctctttgctgagcgcagaaattctttcgagttctgtctgctccgcttgaatcatctcagctagtttgctttctttctcttcaatttgttgttgacgtttactgatactctcctcttttctttcaagtgtagcttctcgtttacttaaagaagtatctttacggtcgaggttttcctccctttgcaataagcgattttctgctttctgtgtctctgttcttcgcccacgaagttcattttcgatttcagtacgtaacctatgattctcttccttcgcttcaagcaatgcttctttttttgtagtttctgcttctttctttgcatcttctacaattaattcagcagtcccccttgcagcagccagttttttctctgtactagatttaaaaattagagaaccaacaactagaccgacgattaagaaaagcaaactggagatgatcgtgattgcgattgtcatccttacacctcctttgctattcaattttcgttattgttatgtcggtggccagaattctggcacatgcgtatttttcatcaacaaccgagtgctaatctccccattcagttgaagccgattttcaaaggaaaaacttcccccttgtctcccagcaatataaaatatacaacttaattttataggtcaaagcatacaatgtcaagaaaaggaatgaaatgacggcttattttcctgagatttttttaaatagcaaaaaatacgtgataggaagtaatttccctatcacgtatttactagtaattattcatcatcaagcaaacttaatgtttcttcattttcgtctaaaggttctttgttagtgccatcaatttcgtattcttcgcgaacgcgtttagagatttcgtctcgaatgtctgtgtgttcttttagatattgttttgcattttcacgaccttgtccgatacgttcttctttataagaataccaagaaccactcttgttaattacatcaacttcagcagccatatcaacaagttcaccttcacgtgaaataccttctccgtacataatatccacttcagcgatacggaatggtggagctactttattttttacaacttttatttttgttttgttacccattacatcagtaccttgcttcaactgctcagcacgtcttacttctaaacggacagtagaatagaatttaagcgcacggccaccaggagtgatttcaggattcccgaacataacaccaactttttcacgaatttggttgatgaagatagcaatcgtttttgatttattaataacacctgaaagttttcttaaagcttgggacattaaacgtgcttgcaaaccaacgtgggcatctcccatctcgccttcaatttcagcgcgtggtacaagagctgcaacagagtcaataactaacatatcaacagcgccacttctaactagtgcttcagcgatttctaaagcttgttcccctgtatccggttgcgatagtaatagctcatcaatgtttacacctagattttttgcataagctggatctagagcatgttcggcgtcgataaatgctgctgttccaccttgtgcttggacttctgcaatcgcatgtagtgcaacagttgttttaccagaactctcaggtccgtatacttcaataatacgtccccgcggatatccgccaactcctaaagcaatatctaatgctaatgagccactagaaatagtagatatattttggtctgaatgttcccctaatttcataatggaacctttaccgaattgtttttcaatttgttttaatgcttggtctaatgccgcttgacgatcattcacgttgttgcctccttcataatattctaatagctgttttttcgcttcttctctcttaaaaaaacagtcagaatgtttttcctagaattactataacgcatttctaagcgagaagcaagcaaaaagcgaacatttattcgtattttttattttgtgtaagcaccggctgctttcttccccattataacgggattccaagcgttcgtctaatacttttttatcgcttatttgtatattataaagctgtttttattcttttctataaaggaaaattacttatttgtatctaaaaattgcttaattaactgaaagccttgttttacagcacgacggcgattgtgatttcgatctctaccataaacgaactgataagcttctgtttcaaaaccagctacatgtaagcctatccaaatagtacctgcgggatgtccttctagactgtctggtcctgcaacaccggtaaaactaatgcctatatcagtgttacaaagtctgctgacattcttcgccatttctttcgcacattctgaacttacgacgccattttcttttattgtttgaggtgagacttcaagaatagattgttttgtctcttcgctgtatgtgaccatgccacctttaaaaattttagaaataccaggaaaacgggcaatttctgcttggaataatccagcggtaaaactttcagcagcggaaatagtgatatttttttcaagcagcatggctgttactaactctggtaaagaaacttcgccataaccgtataaaaaagttccatctctgcgtaaaatttcttgttccgtttcgttcacaagggcactcgcttcctctttagtctttgcagtagcagtaatccgcacaacgacttcattatcacctgcatatgtagcaatagtaggatttacttgcgctaaaatcatatcgtttaaatctgctgctaattgcgattctccaataccgaaaaagcgcattattttagactctaacacatttttctcagtattttcacttacgagtaaaggttcagcataactcgaaaacatcggtttcatttctgaaggtgggcctggaagtaagatgtacgtatgattattttcttttaagaacattcctgcagcaaagccataatcattatttagtacagtggatccttcaataattacagcttgcaatttgttattttccgtcattgttctatttcttgaagcaaaatactccgtgatttcgttcatatgaaacgcatcttctactaagtttttctgtagatgttctgctaaaatttgtttcgtaatatcgtcttctgtaggacctaatccacccgtaaaaatgagaatatcactacgtttttcagcaatgtctatcacatcttttaaacgtttagggttgtcaccaacgacagtgtgatggtagacataaatcccgttagctgctaattcttctgaaataaaagcagcattagagttcacgatttgtcctagtaaaagttctgttccaactgcaataatttctgcgcttgccatttgaatccatctccattcatttttttgtattgaaaaaaagcacacaatggtatgcttttttatttattacatagaacctttaaatactccgcgatttttgtagaaatagtctattccagaccatactgcaaagaatgcacatacatataagaaaattaagtcaacacggatacctgtccaagcaaatgggaaattgtttaataacataagtggaattgcaatcatttgtgtgaatgttttaattttcccaagttggccagctgctaaaacttcgccgccttctacaagaagtaaacgtagacctgttacagcaagttcgcgactgatgattaaaataactacccaagaaggagcaatatgcatttcaactagaatgataaatgctgcagctacaagtaatttatctgccattggatccgcaaatttaccgaagtttgtaattaaattatatttacgtgcaagatgcccatcaaaccagtctgtaagggcagctacgatgaaaataatagttgctactaaacttgtaactggaatggtcgaatcaagccaagagacacttccccagtcaaatggtacaacacatagaacgacaaaaattggtatcataaaaatacggataaccgttaatttatttggtaaattcatctttttctccccttttttacatttaaacagtatgtaatgataaaaatgttggcgaaacctaatgagtagatttcgccatataaaacaaattattctgcatctgagttactagtagtatcacttgcttctaaattaatagttaacacttgtttaacaagcgttggagcaagttctaactctttaccattgactttaacagttgtaacaggcgagtttccaataacgatagaaactgttttgttatctcctaaatcaatttcggtagaagggttggatgtggataacgtcacgtttttaatggtgcttccgtttgcatccgacacgccaatccaagagtcaccagtcgcgctaagagaaagtgtcattttatcagtgttttttactgtataactagtttcgttaccagatgtttcacctttagttacttcaacttctttagctgtgtcttctggtttttcagttgtatctgttgcttttttttcatcagatgttgtgtcttttttctctgtatctttgtttgtgtctttatttttagtagaatcttctacttttacagtcggattgcttgtatcagttttaactttttcagaggtattatcttgtttattaagcaagaaaaaccaaacaatgaaaagaataaaaacaataaataaagcaataagaatttttggtaaaatatcaaagaaacgattacgagagttagcttgattgccgaccgattgagcgggcataggatttcttttactttgtacacgagttggctcattatttactacttcttgttgcggtgtttcaggaacctcgctttcaaactcatcaaaaagtgtcgcactatctagtccaactgcttctgcatattgtttaataaatgcccttgcataaaattttccaggcattacagcatagtttccttcttcaatcgctattaaataacgtttttgaattttcgttatttgttgcaagtcgtctaaactgagtcctttttcacgtctagcttgtttcagtttatcaccgagttctgtcaaaattaaacacctaccattactatttcaattttccactttttactaaaattacataagccaaccgccatttaagcgcaaaacttctccagtgatatagcttgcttttttgcttattaaaaattctacagtttctgcaatttcttcaggttttgcaaagcgtttcaagggaatttcctcacgaagttcttccttttcattcgctgaaaattgatccatcattttcgtttctaccgctcctggtgtcactgcattaacagttattccagaaggccctaattcttgacttagtgctcggcaaaaggcgatttgagccccttttacagtggaataaactacttccattgatgctccgacttctccccatatagaactgatgaaaacaatccttccttgattgcttttcattagctttggtatgaaagtgcggattaaacgcattggcataaacatgtgcacattccataattttgtagtctctatatctgttgtatcctggaataaagcatagtgagaatgccctgctgcatggataaatgcatctacttgaaaaacttgcttttccatttctgctaaacttgcaacatcatcgaaatcagcttgaataagaaatacatctattttttcagcttgtagtagtggtaataaattctccacagcttgtttattttgatgataatgaagatacaagttccagccagctttcgcaagtgatatacaaatcgcttgacctatttctccgctagctccagttacaaaagcatattttatatctttatccaaaaaaaggcaaccctttccagtctatttcttttatgatagcatgactcaggaatttatgccattttttatacaaaaaaaagtaaaaaagacacagaacgattatttttctggaagcaattggaaactagtagtgcgctcttcactgtccaggtttttcacaaaattatttacttcttctaatgtaactgtttccattaaaggtaaaatatcaaagagagaagcagatttcattacatattggctaaattggttggcaataaactctggtgaattaagcgagcgtaaaaattgtccaatacgtttacgttttactaaagctaaatccgcttcatttaagccgtttttagctgctgcttgaatcgcctcaataattttagttgtttgcatatctgggtcttttgcatccccaccaacaaggacaaaggaaaaactgtcttgcagtgtataatcataaccaaaactatcatcaatgattccttggttgtacaattctaaataagtatcagatgtagttccaaaaagcatttcaagcgctacatcaccaataatttcttgtttaagtgctacttgtccttctagagagcctatatcttctttaatacctaccatatttttagcaatttgtactggaaagtgaattttacgttcttttacagcgacagtttttggttcttctggaaaatgacgtttgattggagcagcttctgtgaaatcttttttcgcttgatttgcacgaatttggttcatcatttcttcgggctctaagttaccaacgacaaacagtaccatattgcttggatgataaaaagtattataacaaaggtacagcaaatctttgttaatttctgcaattgattcaacagttccagcaatatcaattttcactggatggttgtgatacatattttcgattacaccaaagtaagcgcgaaaatctggatcatcatcatacattctgatttcttggccgataattcctttttctttttcaactgtttcttctgtaaaatatggttcttgcacgaaatcgattaatgtttctaagttttcttctacacgagaggtgcttgagaaaagataggcagtttttgtaaatgaagtaaaggcattcgtaaaagcgcctttttcaccgaatttaaaaaatacatcaccgtcttctttttcgaacattttatgctctaaaaaatgagctatgccatcgggtactttagtgaattcagtttcgccaattggaacgaaattattgtcaattgcaccgtagttagttgtaaaaacagcatacgtcttactaaatccttgttttggaagaaggtagacttgtaaaccattagacattttttcatgaaatacagcttcttttacttgttcaaatgtgattttttccatgaagttcttctcctcccttgctcaagaaatatattgtgtctggcttgattttattaatagcagcaactacttcttgttttgttgcttgtttaatttttatgatccaattttctaggtctaagtttgcttcgcgtaaaacgttattataagcaagttcaattaaaccttgtgcttggtcatttgtttcaagcaattgattaatgagcatttcttttgtttgatttaattcgtcttcagtgaaatcgccttgtttcattgcgacgatttgttcttcaataatggttaaagcttgtttataattcacttcatcaattccagctgaaattatcatatagcctttaaaagaatcaattcgactggaagcatagtaagctagacttgctttttcacgaacattgataaagattttggaatttgcaaagccacctaaaagtccattagcgagttgaagagcaacaaaatcatcgtctccaaataatgtttctgtttgatacccaagcactagtttcccttgattaattgcttgttgctcatggatgacacgagtttcttttggggcctcttttgtatagaaaacaccttttcgttctggacgcggtgaaaaagccatcttttcgataagcggcataacttcttcttttgttacatcgccgcagataaaaatttcaatgacatcttctttgatgaatttcaaatagtattcatataaatcttttgctgtaatggcatcaacgtcttctaaaacccctgccgccccgaagcggaattcatcgtctcggaacatttcttctactagtcttttagaagcaaaacgaattttatcatcataaattccttctaaactgctttttaaattctctttttcacgaacaactatttcttcatcaaaagcgccatttgttgcatttggctgaaatatagcttgttcaataaaagcaaatgcatcttttaaaatattctcgccatcagaaacatattgaccgtctatcatatcgaaaacgacagttaaaacgtgttcatttccttttttggccgtagttgtatagaagtttgcgccatataagttagctaactgttttctgaaagccgtttgcgtcggatatttttcactgtttgtttctagcaaaattgataataatgatctttttgtaactgtttctctctctaatggagcgcgaaatttaaaaacaattttattagatttatatttttgggtgggaacgattgttagtgcaaccggaccaactttttcttgaaatattttgtctgtcattataatgctcctttcaagcaatgatctcactttcctattgtatcctaagttgttgccacacacaattttctagcataaaaaaacagcctagaataatatctaggctgtcctaatgttttatttgcctttaatgtagttgacaccatctgcttttggagcttcggatttaccgataaatccaacaagcgcgaggattgttaatacataaggcgcaatttgtaagtaaacgtctggaatgtctttgaaaaacggtagcgagcccccagtaattgccaaacattgcgcaaaaccgaagaagattgctgctcccattgctccaagtggattccatttaccaaagatcattgctgcaagggccatataaccttgaccggaaatagttgcgtgtccgaaatcaagtgtaaaggattgcgcgtaaactgcaccacctagaccaccaagaataccagagatgataacaccttggtatctcatccaacgtactttaattcccatcgtatcagctgcaagaggatgttcccctacagaacgaagacgtaaaccaaagcgcgttttataaatgataaaccacgatgcgattgcaaatagaatcgccacataactcatcaccggaatgtttttaaagaaaatatcaccaataactggaatatcacttaaaacaggaatatctggtttaccaaagtaatatttaatttggtcagtttggcctttatcataaattacttttacaaggaataaagatagaccagttgctaaaaagttaatcgctacaccactgattacgtggtcagcgcggaagttaattgttgcaacggcatgaacaagagagaataatcccccaacgaccatagccgcaataagtgatatccaaggagttaaattgccaaaagtatcttggaaagtaaggttaaagacgatagctgagaatgctcccataaccatcataccttctagtccaatattaaccacaccgcctcgttctgaataaacgcccccgagtgcggtaaaaattagtgggcctgccataagcagtgtactagaaacaattgtcgctaaaatggctgtcattctgctttcgcccccttcttaaattttgccatcgcccagcggataatgtagctggatgccacaaagaagataatcagagcgataattacattgactaattcgtttggaacgcctgcaactgctggcatgtttagtgctccgacttttagagcgccgaacaagatggcagagaagacaatcccaattggagaacttcctccgagtaacgcaacggcaataccgtcaaaaccaattcctggagaagaagttaatacataagccgttccataagttccaaggccttccattacgccaccaagaccagcgagcgctccggcaataaccatagaaaagataattgttttctttacactcataccggcatattgcgatgcattttcgttaaatccgactgcttcgatttcataaccaaaagtagttttatttaacattaaccaaataataagtgcaaaaccaagggctattaaaatcccccaatgtagtgacgaataatcagtcattgattgcaataattcagattgtaaagacgcagacgcatgaatttcttgtgttttatctaatccgtctgtaagtaaattttgtactacatagttgaaaatataaagtgctgtatagttaagcatgattgttacaataacttcatttactcgtaaagttgcttttaaaatacctggaatgaatgcccaaagtgcaccaaaaaccataccagtaataatcgcaagtggtaaatgaatccatttagttaaaccatcaaagtttacagcgatgataatggaacctaaccagcccatcagcatttgaccttccgcaccaatattgaaaagtccggctttaaatgcaactgcaacagatagaccaactaaaatgtaaggtgtggcttggcggattgtttcaccaatatagaaattttcaccaacgacaccttctataagtgctgaataaccagcaattgggtcatatccaaaaataagcatgataatcgcaccgcagataagtccaaggataacggctgtaactgggataactaatgcttgtagtcgtttagacatgctctttctcccccatttccgcttcctgtttggatgaaccagccatcatcagaccaagttcttgctccgttgtttctttcggatcaacaatagcaacgattttcccttcgtatataaccgcaatacggtcacttacattcatgatttcatctaattcgaacgacataagtaatacagcttttccgttatctcgttgttcaatcaagcgtctatgaatgaattcaattgctccaacatctagtccacgtgttggctgagccgcaattaagaaatctggattacggtgtatctccctcgcaataattgctttttgttggttaccaccagaaagcgattttgctgctacatattcgctacttgcgcgaacatcgtattcttcaattaactcgcgtgcaaagtcatacattgctttgtgattcaagaaacccttactagaaataggtttcttatagtacgtttgtaaagcaatattttctccaagtgacatctcaagtactaaaccatgtttatgacgatcttctggaatatgtcctaaaccagcttccgtaattttacgtggttttttattctcaatgtgttcaccatttagaagaatgcttccacttgttactttagaaagacctgcaattgcagaaatgagttcactttgaccattaccatcgaccccagcaattccgacaatctcgcctgctcgaacagtcaaattaagtccacgaacactttcgacgccgcggctttctttaacaactaaatcttttacttctaaaacgtctttcccaggagttgcagcgattttttccgttgtaaaaacgacttcacgaccaaccattaaattagctaagtcttgcggagttgtttctggaacgtttactgtacccatgcctttaccacggcggataacagttacgcgatcacaaacatccataatttcttttagtttatgtgtaattaaaataattgatttcccttcttttataagagaacgcatgatttgaatcaattctttaatttcttggggcgttaaaacagctgttggttcatcaaaaatcaagatatcagcaccacgatatagtgtttttaagatttccacacgttgttgcattccgatagaaatatcgcggacaacagcatttggatcaactcgtaaaccatatcggtcagagatttctttaatttcttctaccgcttttttcttctcgataactccgagcttgcttggctctttaccaaggatgatgttttctgcaaccgtaaatttatccactaacatgaaatgctgatggaccattccgattccaagttcattcgctttgttcgggctattaatattttctttcgtaccgcgaacacgaatttctccaccatctggttcatatagaccaaacaagacgttcattagcgtagattttcctgcgccattctcacctaacaaagcatggatttcgccctgctttaactgtaaggtgatgttatcatttgctacaaatccagagaattccttcctgattcctaacatttcaataacaaagtccacttcttcactccccttgtcgtctggttcaaactggaaaaacagccacacgcgcgattctctcgaaggacgccgcctctccccgtacttcctcccgaagaaggttccgagttttttatccgtttgttgttcaatgacttttttcgctaaagtgcttcggtatgttgctaaatacgtttcattataccatctatgtacaaaagcttgtcctcacatttttaagcggttaaaaaagccatctccttattttatttctaaatggcattcattgcaatcataaattccaatataccgattattttcttttagtaaaagggtttacctatcatattaaaacgcttacaaattatttttttatgaaagccggtacgcttaataccgactttcataaaaggttttacttcgttcatattactcagtttttataactataaaatcaaggtttttctggaactttaatgtccccatcaacgattttttgtttgtattcttctactttagctaaaacgtctttagaaatattatcttgatgttcagaaagccctacagcatctttatcaagaccatattcaattttagttccgccagggaaatctccagctttagtacgagttgcaaggtcatctacagcgatatcaacgcgtttgatttcagatgtaagtgttacattgtaatctttgccatcgtttgctgtaacttttccttcgtcccattggtcacggtcaacaccgattacccaaacagcacggctaggatcttttttcttcaggtttttagcttctgcaaagacaccgttaccagtaccgccagcagcatggaaaattacgtcaactccacttgaatacatggaagaagcaatttgttgtcctttgtctgcttttgcgaaatcgtttgcatattgtacatcaatttgtgcgttaggattaacagcttttacaccagcagtgaaaccagcttcaaaacggtcgataacagctccttttaccccaccaacaaatccaactttatttgtttttgttgttaagccggctacaacaccaactaggtaagaaccatcgttatctttaaatccaatacttactacattatcacggtcatcaattgtgtcatcaacaatagcgaattgatttttaggtttttgtttagaaacttcttcaattgcatctttcagtttgtaaccaattccataaatcaaatcatagtcgctacgaacagcagtgtttaagtttgttttgtagtctgcttcagaagctgattgcaaatagttataaccgtctgtacctttttccatgtcgttagctttaccaaatttttgtaagccttcccatgctgattggttaaatgaacggtcatcaacgccaccagtatctgtaaccatagctactgtaaaatctttactgctcttatcatcgccactttttttatcgtcgctgctcgaaccacaagcacctaagacaacgccagaagcaataatcattgatagtgctaaagcaaatgtacgctttttcaccttaaaacccctcccgagagatataatgttagtcagagctttctgtcaaaacaaacattcaggcgcgtattaaaaaattatgtatggtccctttttcggaaaacgcacaaaaacatttaacgtcttctctaactgttcttaatataacatggaaaataaaataaataaataaccaacttcataaatttttaatgcaaatgaattcagaaaatttaattctgtcggaatcattcgatttcaagcttatccctaggtggaagcgcgttaacgtgaaaaagcaaacaatctgatatatttgcaatccgattttattcccttcataataaaaaataacgatgaaaggcgggatgaaaatgacaaaaataggttttatcggttttgggagtatggcaacgttgatagccactaaattgattgaaacaaaggtttgtactccagaggaaatcatcctttactctagttcggcaaacgaccatttcaagcaattttatgataaatatcctacaaccgaattagcagccaatgaagcagaagtttttacaaaagcagatcacagctttatttgtaaattacctttagctgtattgccccttattaaagattgcgaggctgtattaacggcagatcgccacgtgatttcgattgcagctggagttagtacttctgatattttggaactatctccgagtttacaagtaagtaaattaataccttcaatcacaacagtagttagtgttggaactaccttaatttcacacgcagatactgtttcggaaacgaacagcgcttggttagaatcagcttttgaaaatttcggacatgtgatgacaattcgagaagaaaatattgacattgcgagtgacttaacgagttcctcacctggtattatagcggctattttcgaacaattcgtggaagcggctcttcgcagatcgactttgtcagatgcggaaatttttcaaatgattaattttgctttagctgggacttctaaactcttagtggaggaagattatacttttagcggtttaatcgaccgtgttgctacaaaaggcgggattacagctgaaggcgttgaacttagcaaaagcaacttaccttcttttttcgatgaattacttgaccgtactcaaggaaaatacgctacaagtaaaaaagaaattgaagctcaaaaacgagatctactttcttaaaaaaagaggttgcgattttagtcgcaacctctttttatttattctatatctggaggaagttccacattgactcgtcgcggtttactaccttcatgaggtccaactactcctctttgctccatttcatcaattaatctggctgcccggttataaccaattcggaattttcgttgtaacatcgaaacggaagctgtttgcatttctacaactagttcgactgcttcatgataaagttcatccgttacttctccttcaacttcaggaatatcatcaggaatcatttcctcgttgtactgtgctttttgttgcgagataacataattaactacatcttctacttctttatctgataaaaaggcgccttgaatacgagttggcttactagaaccgactggtagtaacaacatgtctccgcgacctagtagtttttctgctccacccatatcaagaattgttcttgaatctatcgagcttgatactgcaaaagcgattcgagatgggatattcgctttaatgactccagtaattacatccacagatggacgttgagtcgcgataatcaaatgaattcccgcggcacgtgccatttgcgcaagtcgtgtaatcgcatcttctacatcgttagaagcaaccatcattaagtcagctaactcatctactatcacaacaataaatggtaattccggttgtttttcttcgttaagttcattatgtttttttacgtaatcattataaccttgcatatttcgtgtgcctgtatgcgaaaataaatcataacgccgctccatttcagcaactactttttgtaaagcttgagctgcctttttgggattagtaacaactggtgctagtaaatgcgggataccattataaacatttaattcaaccatttttggatcaatcatcatcatttttacttcatgtggtttagctcgaagcaaaatgctcgtaataatcccattaatacaaaccgatttaccactaccagtcgcccccgctacaagtaaatggggcattttatcaagacttgccatcattgcttcaccagaaatatctcgaccaagagcaatttgtaatttttcatctgggttatttttcggattattttctagtacttcccgtaaagaaaccatcgctacattctgatttgctacttcaattccaattgctgatttaccaggaattggcgcctcaatgcgaatatctttcgctgctaaagcaagcgcaatatcatcacttaaggaaacaattttactcactttgactccgactgacggttgcacttcatattttgtaacggctggcccaagatgcacttgagtgatttttgctttcacaccaaaactttcgaatgtgtcttctaattttttcgcattaactttaatttgatcgtattctttactttgatcagttactttggcaggttctaaaatatccactgacggtaattgatagatttcattttcaaaagactcttgttggaacatttctaaatctttttctttcacatcggactctgttttttcttctagaggggctttttcttgttctactttagaactaaaattcgaaataattggcggtgttttttcttcttttgaagcatctattggttggcttacctcgattacttcatccgcttctacttcaactaatttttccgctttctttttatctcgtttagcttttacttctttccctttttccttagcagcctttccttttgaaaataagtagcgaacgaattcagtaattttcgagaagaattggcgtacagaaatacctgatactagtgaaaatccataaatgattaaaagaatggcaataatatttgttccaagtcggtctagtaagaaataggtaactgaagtaatagcagccccaatcattcctgcaccaacaaaacctacttgatttggtctaaataaattttctagaactaatttccatgtactagaaacaacaggcgcattggcacctaaattatggatgatgaaatacatatgtatatatgttaaaaaccctaaaacaatgagataaacacctactaatcgtttgctaaaaaggtgtggcatctttcttctaattaccatgtatccgccgagaacgatactcccagcaagtaatacataactaagaagaccaacaaacatttcagccagggcaaagaaacctctgccaacaaaacctaattgtaaaatcccgattatccctattgctatcagaacagcacccgttatctctaaacgaaaagaagctgattttttcttttttgaacgtgtggacgttttctttcgcccagccgtttttttcttttgtgtcgccatttcaagtcccacctattccttttttgcttgttttattatagcacatctatccgtcctgtagctcatactatagccctattatacaaacaaatgtttcctttcgtcaaaaaaccacatatctcaagtaagagacatatggttttagatttgttataggtgtggtgttttcgtattcatcagctttccgccgcggacttctgacatgcttcccccgacagctaagaaggcatctggatctatttcgtccagaatagctttcactttcacttcttcaaatcttgagacgataacgaaaactacttttcttacatcaccagagtatccaccagttgcatctaagtatgttacgccttttcctagttgctccatgatttctgcaccgatttcctcgtaatagcgactaataataaaagcacttttcgattcatctacaccttgaataacaatatcaataactttatacgcaaggaaatacgtaattaatgaatacatagctctgtcccagttaaatacaagtccagcaacgatgaaaatcacaatattgataaacataataatttgcccggttgaaaatggtgttcttccgttgatgatgatggaaataatctcagtcccgtcaagtgctccaccattacgaataacaagtcctacaccaagaccgagtgtcattccaccaaaaacagtcgcaagtaataaatcatctgtcactgggtccatatcatgtaaaacaagtgtcacgatcgacataactgcaatcccgtacaaagtaaaaagtgcaaaaacttttccgattttccggtaaccaataatgaaaaatggaatattaagtacaaaagttaaaacccctaaaggtagcggtgttaactgagaaataataatggaaataccaacgactccaccatctaaaattcggttgtttacaaggaaaagttctaaacctacccccattaaaatcgccccaaaggtaatcattagaaatttataaacaaaccacttcagtctttttctgcgttcttgttttactttttttaaagctagttcttccataaacgattcatttatttgcacatagctcacgcccaatccttacttcattctttattttaggcaatgaaaacaggatttgctttcatcaacaaaattttcgcttcatatttaataagtataccatagctgttttgtacttgtacatatagttaactataagaagcatttattttacggttcggttacttgccagtcttaatttgctatagtatagtattaatgcgcaaacttgtggagaatttttcttacacatgaaatacattttgaagggtgataagattatgagtgactatcaagtgttgttatattacaaatacacaacgattgatgatccagaaacttttgcaaaagagcatcttgctgcttgcaaagaaatggagttaaaaggccggattttggtggctactgaggggattaatggcaccgtttcgggaacagttgaagcaacaaacaaatatatggattatatggcaaatgacgctcgcttcgctgatatggtatttaaaattgacgcggctgactcccatgctttcaaaaaaatgcatgtcagacctcgtgctgaaattgttagtttaagtttagaagaagatgtcaatccacttgaaattacaggtgattatttagaacctgctgaatttcgcgatgcactactagacgaggatactgttattttagatgctcggaatgattatgaatttgatattggccattttcgtggtgcagttcgcccagatattcagaacttccgtgaactaccaggctggattgaagataatcgcgatcaactagaagataaaaaaatcgttacttattgcactggtggaattcgctgcgagaaattttctggctggttgaaaactgcgggctttgaagatgtaagtcaacttcatggcggcattgcaacgtacggtaaaaatgaagaaacaaaaggcgaactatgggatggacaaatgtacgtctttgatgaaagaatcgccgttccaattaaccaagtaaatcctactattgtagggaaagattactttgacggaacaccttgcgaacgttacatcaattgtgcaaatccatattgtaataaacaaattctcgcttctttagaaaacgaaaaaaaatatttgcgtagttgttcgcatgaatgccgcgttcacccggcaaatctttatacaaaagaattatctaaagaagaatttacagaacgacttcaagcgattgatgaaactttaccggaaacggttcaataaacgaaaaaccagcattgctaaatgaatagctgctggtttttttattttctatttgcaagttgaactaaatcaatttctcgtaaactaccccattttgcaagttcaccacttacaattaatggtgtttcttttagttctgcaatatttttcgcatttgctaaaacaaagagtcctcgcaactgttctttccaaagttctaacttttcgattgtttttgatacgccatcttttttcagtgaagaaataatttgcccagccatcccaacactatctgctcctagcgcaagtgctttgacaatatctaaaggatttctaatacctccagatgctaaatatgctatttttggcgcgtcagcatgttgcatatctattaatgcttgcccagttgaaataccccaatcaagtaaaaaattataggcttggtcgcggcggcgatcattttcaatttgcgcaaagttagttccaccttttccggctaaatctactgttgtaacgccgatttcagctagagtctttacagtctctcgtgtcattccaaaaccaacttctttaacgacaactggtactggagaattttttacatatgcttcgattcttgataaccagtgactaaaggaacggtcgccttcttgcatcaccaattcttgcgcaggatttatatgaatttgtagcgcatctgcttctaacatttcgattgcgcgaattccgtcttgaatatccacttctgggctaacgttggctaaaatgataccttttggattaacttctctaacgacttgatatgtatctattagcgaactgttttttagagctgcagactgggaaccaacggccatcgggatagctacttcgcgagctatttcagcgagttcggcattaattctctttgtatgccggcttcctcctgtcatagcattaatataaaatggaaatggtactgttgctcctaaaaaagttgttgttagatcaatatctttcacattgtagcgcgggatagatgtcccaatcaattgaatatcttctaaactcgacggagctaagttctcattttgctttacaccaagagcaacatgttcgtctttccggcgttctcgtaataagtcatcgttcttctgcatgtattaatcctccaaaaaatcgctaatttctttctaaccttaagcaaaagttaaaacgtttttaaaaatggtttctttctcttcagaagttggttgatatacttctccattaaaaaataaaataagtccatgaaaagtttgaatatcgtcttcacagtcttcgcaatattctacttcttcctcattccaagccgctaacaaacaatctttctttgtttgatggttagggtaatttctcagtaaaccttctgctaattcttggtacttcgcaaacgcagcttctttttctgaaaaagtaaagtctgcttgaatagaagtttcccattcctcaaaaaaccaccaaggctcgtattctcctttagttagatagacattccattttgtcatatcaaaaactcccaacactaaatataatacacatattatagcataagctcctttgaaatactggaatgcaaatttttgaaagtaacaacaaaaaaagatacactggtagtaaggaaaaataaaaggagttggtttcgtcatggctagagatacagcgattttgagagtaactggatttgtacaaggtgttgggtttcgttacacaacaaaacacgtcgcttacaaatatgacattagtggaacagtgaaaaatttagacgatggttccgttgaaattcatgcaattgcagaagaagaaaacttaaataaatttattgatgcaataaaaaaaggaccttcacctggttgccgtatcgaacatgtttacatttataaaggtgcgcctgttgaagatcgaaaaacgtttgatattgtttattaaaaatccaaaaatagtggttgtgctatagctctttttgcattatagttaatgagtactaaaaccttgaaaggagcgactgcgtggcatgatttccattttgcaaatcttacttgaaccagaattcatttcactcacagtgacgtttttattaatgttgacgatttttagttattggtcggccattacattattaaaaccgaaaatggtgctacccgctgacgctacctgcttaaagccagtaaagactttacttcgagcacattttgttagaacctcgcctaattttattattaattggctggctattactaagaaatgtagcgccattactgatgatgaagacagtttttcattttccaacagatgaaatgattattttactatttaggaggaaaatgaaacattgaaaaagaaaaatattattttaattagcgtattactaggtgctctactattaattacaggttgtagtatggacccgtcacaaaatacagatggttttttcagtacttatctaatccaaccatttactagctttattatgttcgttgcaaagtttgttgggggtaattacgggattgcgattattattacaacgttacttatccgtgcactcatcatgccactaaacttacgtactgctaaagctcaaatgggcatgcaatccaaaatggcagttgccaaaccagaaatcgatgaaattcaagctcgactaaaacgtgctacatcgaaagaagaacaagcaaatattcaaaaagaaatgatggccgtttattccaagtataatatcaatccgatacaaatgggttgtctaccattacttattcaaatgccgattttgatggcgttctattatgctattcgcggatcttccgaaattgctagtcacacattcttatggtttaacttaggttcaccagatatggtacttgcgataatcgcaggtcttgtctacttagcacaatattttgtttccatgattggttattcaccagaacaaaagaaacaaatgaaaattatcggcttaatgtcgccaattatgattttattcgtttccttcacagctccttctgccctagcgttatattgggctgtcggcggactattcttagctggtcaaacattactaacgaagaaactttatatgaataaacatccagaaatcaaagtaatggaacaagaagaaaaagaatttgaacaaattgtagaagaacaaaataaagaaaaataaaagaaaccgcaacctcgttataaggttgcggtttttctatttggatttcggttcaatgtatggaagcgtaatttttatagtagtacctttatccggctcactgaccgcattaatcgttcctaaatatccttcgactaattgtttagcaatcgcaagtccgaggccattaccacctttttcacggcttctggctttatctacacgatagaaacgattaaagatcttatcaatttcttcttgtgagatgccttctccgtaatcgcgcacatcaatatggatttgcttttgttctttatagacatgcatatccacctcagtgccatcacccgaatatttcactgcgttatccataataataattaagatttgttctaaatgattatgttgaataagcgctcgtaaatccgtatcatcttcttttaaagtaaacgtaaagttctcatacattacttcaaaattacgtctcacttgctcaactgttgcgtttacatcggtaatttgtaattctttcgtttgagaaatctgttctgctcttgataaatcgagcatttcttgtactaattttttcatccgttctaattccgttaacgaagcatttaacgattcatccagtactgccgggtcgtctttcccccaccgagttagtaattttaagtgcccttccatgatttgaactggtgtccgcagttcatgggaagcatcttcaacgaattgtttttgctgctcaaaactagtttcaattcgcgtcatcatatcgttaaaaacaactgtcaattcgccaatttcatctctggaattcgttttcgtttcgattcgtttttgaaaaccatttttacgaatatcattcatagtacgtgctaaccgagtgagtggatttaagaagttctgtgctagtaagtaaccgagcattccactaataaagagcgctactgctccaagcaaaatcattgttactagaagccggtccatcatccgattataggaagttagcggatttaccacttgcgcataaccgatcactgtcgtattatcatctgccacaattggcatttgtgcagtcatcattttctgcccttcaatggttggcttattcataataaatttatccgtgccgctaacaaaatactgcgaaaaatcgatactcgtaatatcttggtttctggaaaaataatacttattaataaaatgaccatctttatcgtatagattaatcacttgatcttgtaatttacgattaacggttttatcgttattaaataaatatttgatttcctcattgtccgttaaatcttggtttgttaacgtacttgtagttgctagaagcagttcttttacttccggttcttcttcatttagcaacatttgcccaatcccttgataaatcgcataggaaaataagaaaaatgttagaaaaatcgctgcactagctccaaaagtccatttaaatttcaaagaacgactttttaaggagaatgggctagttgtcatgtacgcatcacatacccagtcccgcgaactgtttggatgtaactttcttcgtcaggatgatcaattttatttcgcaagtaacgaacatatacatctactacatttgtttctacttctgtttcataaccccatactttgttaagtaatacttcccgagtaagaacaatattgacattttccattaaagtaagtagtagttcatactcgcgttttgttaaatcaataatttcttcatcgcgttttacaatccgattttctttttcaacgattaagttgcggtattgtagcgttgtttgtttagcagattgttctgcattttctactcggcgtaatagtgaacgcagacgtgcaagtagttcttcaattgcaaatggcttaacgatataatcatctgctccgtggtcaagtccagatacgcgatcaatcacagagtctcgcgcagttatcataatgatgggtgtttgtttcacttggcgtacacgacgacaaacctctaccccgtttaaatgtggtaacattaagtctagtaaaatagcatcccattcttcatttagtgcgagttctagcccagcacgtccatcattagcaacagcagtttcataattttcgtgttgtaattctagttcaataaagcgtgctaagtttttttcatcttctacgattaatattctattcatttggcctaaccctctctttcgatcattacactatattcctattactattgtaacgaactttggctcaaaaacaactaataatagcgcataaatagatatttcctgtattttttagcactttaccattatttactaatttaaatctcataaaaaaacatccactcgtgaaagtggatgcttaattttaaatcaatcttcaacttgtggccattctgtatggaatacgcctggtttgtcaactctttcatacgtatgagcaccaaagtagtcgcgttgagcttgaattagatttgcagataatacttcagaacgatagctatcgtaatagctgattgctgcagtgaaggttggtactggaataccagctttgacagcttctgctactacagtacgaaggtcgccttggtagttatgcgcaatatctttgaaatatggatctaatagtaagtttttaagatttttatctttattatatgcatcagtaattttttgtaagaaacgagcacggataatacaaccagcgcggaaaattttcgcaatttcgccgtattgtaggtcccaatcgttctcttcactagctgctctcatttgtgcaaaaccttgtgcataagatgcgattttgctgaaataaagtgcgcggcgaacagattcaacaaatgcttttttatcgccttcaaaacgataattagatggaccagataaaacagtactcgcataaacgcgttcatctttcagtgcagaaatgtaacgagcaaatacagattcagtaattaaggaaagtggaacacctaagtcaagtgcgctttggctagtccatttaccagttcctttttgtccagctttatcaagaataacatcgacaattggtttgcctgtttcttcgtcttttacttttagaatgtttttagtgatttcgattaaatagctatctaattctccgttattccattcttcaaatacgtcagcaagttcatcatggcttaatccaccgatttctttcaaaatagtgtaagcttctgcgattaattgcatatctccgtattcgataccattatgcaccattttaacgtaatgtccggcaccatctggaccaatataagtcacacatggttctccgtctgctactgcagcaatttcacgtaagataggagctacaagatcatatgccttgcgttgaccgcctggcatgatagaaggacctttaagtgcgccttcttctccgcctgatacgccagttccgatgaagttaaagccttcttcacttaattccttattacgacgaattgtatctttaaagaaagcattcccgccatcaattaaaatatcgccttcgtttaagaaaggtttaactgcttcaatcatcatatctgtagcatcgccagcttttaccataataaggatacggcgaggcacttcaagagattcgacaaattcctctaaactataagttggtactaattttttgtccgcattttcttccataaccgctttcgttttttcagtagaacggttaaagatagatactgtatgaccgcggctttcaatgtttagagccaagttacgacccataacgcccattcctataacgccaatttcttgttttgccattttgcacttcttcctttccggtttattaaggcagaaaaatctgtcttacttcaacatgacacataaaagtatcaacatcatttactatatcaaagaattgcttcttggacaatgaatcaatccgaattatttgacttttttttattaatttagctttctcagtaaaattttctcattttttgccgattcagctaagtcaatgacgagttgtgtcagtttttctaactgctctacggaaatagtttctttttctgaatgggcatgtacataaccggctgataagagcattgtaggcacgcctttttcattaagcacgttggcatcagtaccgccttctaaaaagatctcgctagtctttaaagcttgttttttagctgctttttgaaaaatattcataagtggatgttgcgggtggattttgtagccttcgtaaataagtcttgtatcttctgctaatgtagcgccatatttctcacaggtttgattaaaacgttctctgattgtttggatatgaggtaacgccttcctaaaactagcagcagatttgaacagaacttctaattgggcatcttgttgattttcatcatttactccaccagaaaacgactggatttcccatctgttctcgcggtcaatccggcctggtctcgttgcatgaagcgccattctcgctactgatatgggtgacatctgggtcgcatcagggcttgcaatcgtgaaatcaactgcaactaatgtattcgcttgtaattgataattcccaacttctccaggagcatcgagacaataaccatacgctgctgttattttttcttctggaaataaacgcatcccaatcatgcccagttcttctttagtagtgaaaatgaattcaatttccccatgaggcgtttcttctgtactaaaataatccattgccgctaacatggctgctactgctgctttatcatctgcccctaaagaagtcccatttagagaagtaaatatgccatcttctacttgaaattctggtgaagctgcatttggatgcgtatcaacgtggccacaaaagaaaatggtcgggaatttcacagctgttgcgggaattcgcgcaattaatccgttatcctcatctaaactgtaggggatatttaattttgttatttgtttttttatgtaagttaacactgctttttctttcccagaaacagatgggatttgaattaattctgtaaaatatttttttacattagctatcatcttgttttcacctacattcttcctttttgcttaaaaaataaataaaccacttgaaatttactgtaattataagtaagatggatatatctgaaatgctttatgagaggagttttcttccgcaatgactaataaaaaagtagttcgcgttgtcgttattttaatgttaatcgcgattgtattatccagcgttttaaccgggttactaatgtttttatagacatccgaggtctgagccaatttggttcaggctttttttatttttttcctcaaaaaaagagcagcacccgaaagtactacccaagacatctagggagtttaggggtatggatctagatgtactaaacaatacccgctaaacctagattaaaacatttttaatacaatgctgtattttctttggaaatcttttcgacattggctttaattgcttgtaagaatttaccagctagtaggccgtctaaaatacggtgatcgatggatagacataggttcaccatatctcgtacagcaatcatatcgtcaataatgacaggacgtttaacaatggactccacttgaagaatagctgcttgtggatgattaataatgcccattgattgaacagagccaaatgaaccagtactattcacagtgaaagtgccaccttccatatcggcttgacttagtttaccattacgcgcttttccagcaagttcgcttatttcgcgagcaatgcctttaatggatttttcgtctgcatttttaataactggaacgtacaataaatcaccagctgcaatcgcaatcgaaatattgatattcgcgtgctcaataattttatcgcctgcccacgtgctgttaagttgcgggaattctttcaatgcttgtgcaacggctttgatgaaaaaggcgaaataagttaatgaataaccttcttcttttttaaagctatcttttactgtattacggtaacgaacaagtccagttgcatctacttccaccatcatccatgcgtgcggaatttcttgtttgctcacgctcatatgtttagcaatggcttttcttacgccattgattgggatttctttatcgccagctgcggaacgaacaggtgcaggagttggtgctttttcttgtgctctatttgttggttcctctgttttagtagctactggtccgttttcgatgacttgaagtaagtcttttcttgtaattcggccacctttacctgtgccttctacagtggataaatcaatattgttttcaccagcaattcgtagtacggctggagaaaatcttccactagctggtgcttctgctagtttcacttgttttgtttcttgtttttctggagcttttgtttctgtttgttctacttcttcagcaggctcagaacttcctgcatctgctgtttcaattgtacaaataacctcgcccacttcaagcgtttcgtcttcttctgctaaaatttctttaattgtcccgctaaaagaagatgggatttctgctgttactttgtcagtaagtacttctgcgatagcatcatatttttcaactgtatcgcctggtttaactaaccatgaactaatcgtaccttctgttacactttcccctaatttgggcatggtgattttttcaactgccacgggtcttcactcctttaatttaaaacgggtctaaaattccgctaattctttcattgcatcagcaactttatctggattaatcataaagtgtttttccatcgttggcgcaaatggcatcgctggagtatctggtcctgcaagtcgtgcaatcggtgcatctaggtcaaatagacaatgctcagaaataattgcagctacttcactaatgatacttccttgtttattgtcttctgttacaagaagtactttaccagttttctttgttgcttcaataatagcttcttggtctaatggataaattgtgcgcaaatcaagaatgtgcgcttctacgccttctgcagctaaccgttctgctgcttgttgggcgaattgaacagcaagaccataagtaatgaccgtgatatcatcgccttcacgtacaacatttgcttcaccaataggaacaatataatccgtttcaggtacttcaccttttagtaaacgataggcacgtttatgttcaaagaaaagtactggatcgttgtcgcgaatggctgcttttaaaagtccttttgcatcgtacggggaagatggtacgacaatttttaaaccaggttgtccaaaaaacactttttcgactgattgtgaatgataaagtgctccgtgtaccccgccgccaaaaggtgcgcgaataaccattgggcaagaccaatcgttattagaacggtaacgaattctggaagcttctgaaataatttggttcacagctggcataataaagtcagcaaactgcatttctgctactgggcggtatccatacatcgctgctccaattccaactccagcaatcgcggattcagcaagtggtgtatcaagaactcggtcttcaccgaactcatcatataaaccagcagtcgctttaaaaacgccaccttttttccctacatcttctcctaaaataaatactttatcatcgcgctccatttcttctttaagcgccattgttattgcatcaatatatgaaatgactggcattcaaattccctcctaatcagctattcgcttcttcatcgtatacataaagtagagatgattctggttcagcgtatgctgcactttccgcgtaatcggtcgcttcattaacttctttagcaatacttttttcgatttcagcaattttttcttctgttaaataaccttcttcaagtaattctgtttggaaaattttcagcggatcttttccttttgcttcgtcgacttcttctcttgaacgataactgctatcatcatcatctgaggagtgtggtgtgaagcggtaagaaactgtttcgattaatgttggtccctcgccatttcttgcacgatctgccgcacgtttaaaggcagcatatacttctcccatattcgagccatctacgcgctcaccagggataccgtaaccaagtgcccggtcagatagtttttctgctgcatattgttttgatgcaggtacagaaatcgcatattggttattatgaataacgaaaacaactggcaacttatgtacagatgcaaagttgattccttcatggaagtctccttggttagaagatccttcacctgttgacgcataaattgcaatgtcatctccagccattttggcagcaagaccaataccggctgcatgtggaaattgagttgttacaggagaactttgagtaacaatgcgattagatttttgaccaaagtgagctggcatttgacgtccgcccgagtttggatcttccgctttagcaaaggcagacaacataatatcttttgctgtcattccaaatgctaatacgactgctaaatcacggtaatacggcaaggcatagtccttctctaaatcaaaagcaaatgcagcaccgatttgtgctgtttcttgtccttgtccagaaatggtaaaaggaattttcccagaacggttaagcaaccacatacgctcatcgagtcttcttgccattaacattgtttcatacattttaattaatttatcttctgttaaacctgcttcttttaaagtcatttttgttcctcctttaaagctgtattaaccatgaattgcattaccatccacagcaagggcagcttctctaaaactttctgataaagttgggtgcgggtgaatagtgttacccacttcccatggggttgcatttaaaacttgtgctaacgcggcttcgctaatcatgtccgttacgtgcggtccaatcatgctaacaccaagaatatcatctgtctttttatcagcaataatcttaataaagccatcagattctccgtaaacaagtgcttttccgatgccacggaaaaagaatttgccttttttaacgtcatgaccacgttcttttgcttgttcttctgtaataccaacacttgcgatctcagtagaagtataaatacagcgcggaactaagtcataaccgagtttttcagtttctttaccagcaatgtgattggctgcaattgtcccttcttccattgctacatgcgcaagttgaattgtcggaatacagtcaccaatcgcgtagatatgactttcttttgtttggtaaaaatcatttacttggataaagccgttttcggtcgcaatatccgtgttttgtaatccgatattttctgtattggcagaacgaccaactgaaacaagcattttatctgctgtgaaggtctgctcttcgcctttaatgactgctttgatttccacaccggaatctgtttttttataactagctgcttgaacttcagcagatgtatgcattgttagttttttctttttataaagtcttgctaattctttcgctacttctttatcttctgttggcaaaattcggtccgcatattctagcacagtaacttctacgccaaaatcatgcatcatcgaagcccattccattccgataactccaccaccaacgataataatcgattttggtaaagtttctaaattaagtgcaccgtcagaagataatacattttcctcatcaattgttaaaccatttaatgtgcgaggttttgaaccagttgcaataattaggtttttaggaattagcatttcattttctgaaccatcttcaaattcaactgaaactgttccggctgttggtgaaaagatggaaggtcctaaaatagttcccgttccagcaaataagtcgattttgccttgtttaaataattggtgaatccctttttctaattggtctactatttgttgtttcctctcttgggcttgtaaaaagtttattccggcagttccttctaccgaaattccaaattcgcttgcttttttaaccgtttgcaatacttcagccgaacgtaataaagcttttgttggaatacagcctcggtgaagacatgttccaccaacttttcctttttcaaccacggctactttttgtccgttctttgcggcttggatcgctgcaacgtatccgcctgttcccccaccaagaataactacatcatattctgttgccacattatctcctcctttagtacactttttctttttcaattccagcgagaacacgttgtacaccactgtttagagcttctaattcatcttctccaggttctataattactctggctatccagtttgtttgctcgataattttacttgtaaatagttcacttctagcaagtccaccagttaaaataatagcatcaattttgccatgtaaaacgacggaacatgcgcctatttctttactaacttggtaagccatcgcatcaaaagctttgatggcatcctcatcaccagcttgaactttattttctacatctaacatactatttgttcctagataagaaatcatcccgccacggccgacgattagctcgtgtagttcacgtttcgtccacttcccactaaaacatgcttctaaaaaatcattcattgggagtgaaccagatcgttcaggactaaaaggaccatcgccatctagtgcattatttacatccactgctttcccttgtctgtgtgctgcaacggaaatacctccaccaagatgcgcgataacaaaattcattttctcatattccgaacctagctctttggcaatttttcgcccagccgccttatggttcaatgcgtgaaaaatactttttctagcaataagttcatttccagagaatctagctactggttgcatttcgtctactacaacgggatcaacgataaaacttggtattccgagcttatctgctaattttttagcaagcatagcaccaaggttggaagcatgctcaccgtacttgttgttttttaaatccgctagcattttttcagtaaccatatatgtaccgccagcaactggtcgaagcaaaccacctcgtccaactactgcatctaatttatttacatcataaccaaacgcatcaatcactcgtcgcaaaacttgccatctaaaatcaaattgttcctgtacattgttaaagtcggcgaattcttgcattgtgtgtctgactgtttcttcaaaaagtactttatcgccatgataaacggcgagttttgtagaagtggaaccaggatttattgtcaaaacatcataagacatttgatttcctccaaatttaattgtgaaaaatgctgtaggttatcattttcccaaggactattgtaacacgtagggcgtaatcaaataaaagcctttgcattcatatcattaaagtccgtctattcacattatttcattattttccaaccattctaacagttaggataaatgaagctaatttattttctggtgtatcatttctggaagatataacaatcggtacttttgctccgacaatagcactaccaactctagctcccgcaaagtatacgagcgatttataaagggcatttccagtttcaatattaggggcaattaaaatatccgcatcacccgccgcattatttttaatccctttatgctgtgccgcttcttttgaaatagctacatcaagtgcaagcggaccagcaatatctatcttgcctttgaaatgatttgctacttcattcgcttcgaccgtagaaggcattttttcggtaacttcttccaccgcgctaagtaaagccacttttggatttgttataccaattttctgagcaacattcagcgcattttctgtaattgctattttttcatttatttttggagcaacattcattgcacaatctgttaataataaaggcttgtggtatgtcggaatatcgaaaatagcaatttggcttaataattgccctgtccgcaactcattttccttttttaagacatgatgcattaaagtagctgtcggaataaatcctttgaccaaaatatctgcttctttatttttcacagctaaaatcgcgccctgtgctgcctcttctgctgtattcgcttgaatccaagtaacgctgtcgtttgccgttaagcttcgatcttctttttttccaaataaaagaaacttgcctaaaccttgatccagtgctagacggatggtttctaaaacgacttcatcatctgctccagctactgcaaaaaccagcgaactcgtttctgccacttctttgaaaaatcttttgcttgtcataaaaaataactcctttatcgcacaaaaaagccgcatttcgaattagtagttgtttttatgaccaggtaataatttctaccttattcattttaagcaaaaactattcgatatgcaagcaatttcgtttttttaataggtttgttttactttttcagcttgttgaatcatttctttcgcgtgttgttttgttagttcagtcacttctatcccagcaatcatacggctgatttcttctactttttgctcgccttttaaaattgtgacggaagtagttgtccgtttattttgcactttttttgtgatgtagtaatggtgattggccattgcagctacttgaggcaaatgactgatacaaagaacttgtgaaccaacagagactgcataaattttttcagcaatcgcttggccgacacgtccgcttacacccgtatccacttcatcaaaaatgatagatgtaatgccttgatgtcttgaaaaaatggtttttagcgctaacatcattcgtgataactcaccgccagaagcgattttcgcaagtggttttagcggctcacctggattggtcgacatatagaagacgacactgtcttggcctgattccgttaattctgttttgtcagactcaaagtgaacactgaaaatagctttttccatatatagttgatttaattcttgtttaatttgtttttctaacgtggttgctgcttttttgcggatgtcagtgagtgtacttgcttgttttgtgagttctgtttttaatgtggccattttagtttctaaatgcccaacgtgggactcactatccgtcagtttttccatttcagtactaatttctttttcatactgaataatatcttcaatggttttaccgtatttacgttttagttgatttaaatcattcaagcgtgattcaatttgattcagttcttctggttggaattcaagctgatcaagcgattgtctaatttggctcatactgtcttcaagcatatagtaactggatgatattgcttcactaactgctttataatcagtatgaatactcgcagccgcttccatctgacgcattgcttctccaataaattcaagtccgcccggttctccttggatagctgtatacgctccttgcaagttttcatttaacttttcaaaattcgctaaaacatttttttgttctaataaacgatcttcttccccagcttgcaaatttgcattttcgatttcttgttgttgaaaacgaagcatatcgagccgctgtgcaagttctcgctcatttttcgtccaattttgccattctctcaaaatagtttggtactctttaaaattagtttgatatttcgttaaagcgggtttaattttatcagcagcaaacctatctagtaacgataaatgaaattcttcattcattaattcttggtgttcatgttgactatgaatatctattaatttagaaccgatttgacgtagcaacaccgtagttactagttttccgttaatacggcaactatttttaccggagcgaaataagctacgttccaaaacgaccatatcatccgaagcatctattccattttccaaaagtgcattacggcaggcaagattatcttctgctagggcaaataagccttgcagttccaaacgttcctcaccgtggcgaataaaatcagtcgatccccgtccgccaacaagaagaccaagcgcatcaataataattgatttacctgcgccggtctccccagttaataccgtcatcccttcttgaaaagttaaagagagtgattcgatgatagcaaagtttttaattgtcatttcttgaagcaaaatccttcacctccaacaatttttaaagcatatctataaaacgatctgttaatgtttttgcattttcttctgagcgacaaatgattaaacaagtgtcatctccgcaaagtgttcctgctttttctggccagtctaagttatctattagcgcaccaacagagttcccattccctggcattacttttaaaataatcataaattgcactgtatcgatacaaataaagcaatcaattaaagcgcgttttaatttttgatgggggttaaagctattatcggcagggagactatatttatagccaccagtttgtgttggaactttgactagatgaagttctttaatatcacgggaaacggttgcttgggttactttaacatcgcgttctaacagaagttctactaaatcttcttgcgtgtcaatctcattagatgtaatcaattctcgaataataatatgacgatgacctttattcattccttcttcacctcacgataattttctacttacatcttatccgaaaaaacgcataaagtcacggaattaatgcaaaattatgcaataaagtctagtttaatactctatacattgaaaatacatgcttaaatgagtataaacagcatagtaaaagcaaaaaccggaaaacatcactgctttccggtatacattatttatctaatttagtatgtgcttttgtaataagttttgtaattgcagctggctctaaatgattttcaccagtttctttgccagtccatttaagatgcgcaataaattcaatgtttccttctccaccagttattggtgaaaaatcaagccccatcaagtcataaccattatcaagcgcaaatagagcaatgttttcaacaacagcttcatgtacagctgggtcgcgaattattccttttttacccacctgttcacgtcctgcttcaaattgtggtttgattaaagtcatcacatcgccacctgttacgagcacagttctaagtacaggtaaaataagtttgagtgaaataaaggaaacatcaatcgttgcgaattccgctaagccttccgtaaaatcagctggcgtcacatggcgaaagttagtccgctccatgactgtaacccgttcatcattacgtaatttccatgcaagttgattatagccaacatcaagcgcatacgaatgtcgtgccccattttgcaaagcacagtctgtaaaaccaccagtagaagctccaatatcaagcattagtttatctttcacatcaaaattaaatacttgtaatgccttttctaatttcaagccaccacgactcacataaggcatttgttttcctttgacttgcagttcgctatctgccggaattttttctccaggtttgtcgacacgttcttctttacggtaaacaattccagccataatggcacgctttgctttttctcttgtttcaaatagtccttgttctactagcagaatatctgcgcgttctttttttattgtcatagtttcttcgcccttaacttactcgctttgtgcgagcatttcatttatttttaatacaataccagttggagatataccataggattcaagaattagcgggacagaaccgtgaccaatgaattcatctggcaacccaatacgatggatagtaacatccgtataattattttcttccataaattctaacacacttgcgccaaatccgccttttaataatgattcttctactgttaaaatagggattttttgcttaaaaattcggtgtaataaagcttcatctagcggtttaataaaacgtgcattaatgacacccacacgctgacctagatcctctaattgttcagctgctttaagtgcctgttcgagcgttggtccaaaagttaaaataacagcatcaacaggctgaataatcgtttcccattcgccaattggtataagcttactagattcagaaagctctttacccggtccatttccacgtgggtaacgaattgcaaaaggcccatcatcataagcaaaagcagtgtccattaattgtctagcttcttcttcatctttcggcatcgtgataatcatatttggaatactatttagaaaagaaatatcaaaaataccttgatgtgtttcaccgtctgctccaacaaggccagcacgatcaatcccgataacgacatttaatttttgccgacaaacatcgtgaaccaactggtcataagctctttgtagaaatgtcgaataaatagctagaaaaggcttcattgcttgcgttgctaaaccagccgccattgttgttgcatgttgctctgcaattccaacatcaaaaaaacgttctggaaaagttttagcaaatttttctaatttggaacctacaggcatggcaggagttatggcaacgatacgttcatcattcgctgctagacgcattaattcattactaataacagaactccatgaggcgacagtcttagcaggcttaatgaagctccctgtttcgactttatatggccctgtaccatgccaggtgccacgggagtctaattcggcaggttggtacccttttccttttttcgtgatgatatggaggagtacaggtcctttagtccgcttagctatttctaagttggtaataacatcttctaaattatgcccatcaatcggtcctagatacataaaacctaattcttcaaaaaaagtaccctctacaagcaaatgttttatgccgtcttttgctttttcagcagtgtcagctaacttttcaccggcagttggaatttttcgcattaatttatctatatttgtttttgtttgttgaaatgtattcgaagttcttaattttccaaggacattgtggagtgctcctacattaggcgcaatggacatatcattatcatttaaaataacaatcatatcttttcccatgtctcctatatgattcaaggcttcaaatgccatcccaccagtgagcgccccgtcaccgattatcggaataacataaaagtcttctttttttatatctctagcaataaccataccgactgcagcagacaaggaagtcgagctgtggccagtttcaaatacatcatgaatagattcttttcgttttggaaatccgtctagtccgccgtgctgacgtaatgtatcaaattgactcgcccttccagttaggattttgtgcacataagactggtggcccacatcccaaataaatttatcatttggactattaaaagtgtaatgcagcgcaatcgttagttctaccacaccaagattaggcccaatatgccctcctgatttggaagtagaagtaattaaaaaagcgcgaatatccgccgcaagtgcttctaattcttgtatatccaattgtttcataaaggaaggatcctttatttttaaaagatccaaataaaaacaactcactttccaaagagtcctcgcatgaatacatgcaaagtctttttctcgattaattgttcttattatagcaaataattctagttataccaaacaaggaaaggtgattttaggcaaataaaaaagcaaatcaccgaaatgatttgctttttcttattcaaaaaatagaattacgctttttgaacgttagctgcttgaggtccgcgttggccttcttcaacgtcgaaagttactgcttgaccttcgtctaaagatttgaatccgtcgccttggatagcgctgaaatgtacgaatacatcgtcaccgttttcgcgttcgataaaaccaaatcctttttctgcgttaaaccattttactgtaccttgttccatgttcatgttcctcctcgtgtgttatgcacactaattatttactattcttgcttaacggcacgagatggaaagttgttcacaatcgtatctttcacccacaaaaataatcttacattagtataacacggtattttaagaaaagcaaatcaatttgaattatatatgtgaaaaatttttgaaattactagataattatgattaattttctctaagtgcgattaaatcagcaagtttaaggagaatttcatcgtcgaaatcatgtcctgaaagcgctgactttgcaattgaaacatgctcatttaatgcccgtttagcaccttcgagtgtgagtaatccgggataggtacttttattcagaaaagcgtcgacccctgtctttttacccatttttgtttcatcgccaattacatctaaaatatcgtcgctaatttgaaaaccaatgccgatattttctgcaaaaattcgtaatcgttttgtttgttctggagttgcttcagcgatttttgcggctgaggttactgcgaaaattaatagttcaccagttttgcgagcgtggattgatgctagttcttctaatgtgacttgtttattttcagcttccatatcggcttgttgcccacctaccatgccttctgctccactgctataactaatttgattaattaaagcaatacgcgtttcgaaagatagattttcatcttcagctaaaatagaaaaagcgagtgttaacaaagcatctcctgctaaaattgctgttgcatcaccgtatattttatggttcgtccatttcccgcgtcgatagtcatcatcatccattgctggtaaatcatcgtgaattaagctgtacgtatgaatcatttcaagtgccgtagctgtttttaaaccgcgcattggctcaatatttaaggcttgaagcgttgcaaaaacaagcattggacgaattcgttttccgccagcttgcactgaatataacattgattctttcaacttaggttcgatattgcgcatatttatttctttaaaaagcgactcatcaagtacttttttataatgatctagaaaaagcatcaaatcttgcaaatttattcaccatccgcttcaaaaggaatttcttctcctgcttctgtgactactttagccattctttgctcggctgattgcaatttatcttggcataattttgttaattcgattcctttttgatacatatcaagagaatcttcaagtgaggcactaccgttttcgagcgcttctacgattgtttctagttctgcgattgcttcttcaaaagttttctttttagttgccacttgtatcttcctcctttgcggtaatatgtgcgtctatgtgtccaccttgcatttttacttgaatattatcaccaatttccaattcttggacggttttaactaactctcctgctttatacgttacaccaaatccacgtttcaataaagcgagcgggcttaaatgttctaaagcctcgacttgtctaataaaagcttgttgtttatctttaagttgttgtttcattgctttatctaacgcttgcttacgtaatattatttgctctttttgtaaggctatttctttcttaggatggtaatagtgtaaacgatcatttagtcggttaaaagtagtttgttttagcaatacttgcttggaaaaagcattttttagtcgttcagcaaaataatctgtacgttccatttgctgttctaattgatgttttggcccatttaagattaaatgttgttttagttgctcaagtgctctttctttacgttctaacaactgccttgtaactgctaataagcgatatttacgttctgcaagtcgttcttctaaatcgcgataatctggaaccgctagttcagctgctgcggttggtgtcgctgctcgaacgtctgctgaaaaatcactgagcgcaaagtctgtttcatgtcctaccgcagagattacaggtacatcagaatcataaactgctcgaacaactggctcttcattaaaagcccatagttcttcgagagagccaccaccacgaccgataatcatcacatcaatatcatttcgctgattgattcgaccaatgttttctactattcgctgagctgccttatcaccttgaacaactgtaggatacacgattacttccaccgagggcattctacgatgaatcgttgttaaaatatcccttacagcagcacctgttttagatgtaactactgcaactttggacgggaaagaaggaagcacttttttatgcgcttccgcaaaaagtccttccttttctaattgtgatttcagctgttctaattgaatatacagtgcaccgacgccatctggttccatatgttcagcataaaactgataacgcccagcttttgtgaaaacgccaattcgccccgtgataagtacattcataccatcttctggaacaaaaccaatcttttgaactgctttttgaaacatgacagaacgaagcatagcaaattcatctttcaccgtaaaatacagatgtccactcgctggttgttttaaattagaaatttctccgcgcacgaatacttgtttcatatacggatcaacttcaaatttcttttcaatatatttggttattgcggctaccgttaaatatttatcttgttccatcatttcacatccaattaatcaattcatcttccaaatgcgttttgcagcttttaatgtattagcaagaagcatggtaattgtcattggcccaacgcctcctggaactggagtgatgaatcctgcttgctctttgacatcatcaaaatctacatcgccacataatttattgttttcatcgcggtccataccaacatcaataacaattgcgcctggcttaatgtattcttttttaacaaatttagctaatcctgttgcaacaactagaatatcggcttcttttgccacttgaggtaaatcttttgtacggctatgagctattgttactgtagcattttcatttaataataattgtgctactggcttacctacaatattacttctgccaataacgactgctcgtttgccttctatttgagtgccggttgatttaattaactcaataattcctgcgggtgtgcacggaacgaaagaatctttaccaatgaataagttacctacattcaccgggtggaaaccgtcaacatctttgtcaaaactaatagcatcaatgactttttcttctgaaatatgttttggtaaaggtaattgtaccaatataccatgaattgtattatcttcatttaactcttctactacttttagtaatttttcttctgttactgtttcaggaagttcaattaaaacagatttcattcctgcttcttctgttcgcttttgtttatttctaacatatgtacgagaggcttggttatctcctacgagcacaaccgcaagacccggttttttaccttgttttactaattcagctacttctgatgttactttctcttggatttctttggctaactttttgccatcaataatttctcccatgagtttggcccccttaaaatactttccacgctattatgcttaaaaatcgcgaaataagggagtgcaaggaaaaccttgcactcaatcaagtttatttatcttcaggtgcaatattagcaagtacgccattaataaatttacttgatttttcatcactgtaaattttcgcaatttctatggactcatttaaactaactcgatttggtacgtcatccaagtacttaatttcgtaaacgcttagtcgtagcaaagaaagatctactttgttcaaacgatcgatgcgccaattatccaagttaggctcaataatcgcatcgatttcagctttatttgccataactccttcaactaattgctccatataatcgtcttgttcgtcttccatgatgtttttaatggcttgatctaacgacatttcgtttaattcgatttggaataatgcttgaagtgctttctcgcgcgcttctcttcttttcatgttaaggctgctcctttttttccttgaattttaaagctcaaaatcatcgaaggaaagtgtttctgttttttcaaattgtacgccaacgatatgcacgttgatttcaagaacattcaaccctgtcatattgaaaatagtatctcggacagcatcttgaatattttgagcaacaagcgggatagttgcaccgaatagtacagaacaataaagttcgattagaataccttcttcagttagctctacctttacacctttacggtagttaacggcaccgctgaatttttcgcgcatttctgtagcaaaaccaccttgcatatacgcaacgttttcgatttcgctcgcagcaagaccagcaattacaccgataacctcaggcgcaatttcaattttaccaagtggtgcatcattttgttttcttaaatcttttgtgtaagccatttttagccctccttagaaagattcattacatcattttgctccaagaattttgtattaaagtctcctgacaggaatacatcgttatctaacacacgtaaatggaatggtattgtggaaggaatgccatcaatagcaaactccgaaagtgcccgtttcattttttgaacaacttcttcacgtgtttctgcataacagattacttttgcaatcattgaatcataaaatggcgggattttgtagtttggatatgctgctgagtcaattcgaacgcctaagccacctggtggaagataaaatttaatttctcctggtgctggcataaagtttttctcaggattttcagcattaatccgacattccatcgcccaaccggttaatttaacatcggcttgtttgattttcagttcttcacctgaagccactaaaaattgttgttttactaaatcaataccagtaacaagctctgttacaggatgttctacttggatacgagtattcatttccataaagtaaaaattattttcgtgatgatcaaaaataaattcgatcgttcctgcacccgaataattcacggcttttgcagctttgacagcagctttacccattttttggcgtgtcttttcatcaatagctggtgaaggtgattcttcaattagcttttgtaagcgacgttgaatactacaatcacgttctcctaaatgaataacattaccatgattatcggcaagcacttgaatttctacgtggcggaaatcttgaatgtatttttctaaataaacgccaggatctccgaaagctgcttcggcttcttgctgtgtagtttgaataccagaaattaatttttcttcattttctgctacacgaatacctttacctccaccaccagcagttgctttgatgattacaggataaccgatttttttagcgatttttttgccatcttctacatcagcgacaattccttgtgaaccaggtacgattggtacgccagcttttcgcattgtttcgcgagccacatcttttgtccccatttgtgaaattgcagaggcacttggcccaataaaagtgatgttacagtcttcgcacaactcagcgaagtcagcattttcagccaagaatccgtaaccaggatgaatcgcatcacagtttgttaaaacagcaagactaataatattagacatatttaaataactatcttttgttgccgcgggacctacacaataagcttcatccgctagctgaatatgtagcgcttctttatctgcttccgaataaatcgccactgtctccactccaagttcttttgcagcgcgaatgatacggacagcgatttctccacggttcgctaccagtacttttttaatcatgtttttcgaccccttatttttttctaactttgaatagtggttgtccaaattcgactaattcgccacttgaaacaagaatttctgcaatttctccgtcaatgtcagcagtgatttcattgaataatttcattgcttctacaatacatacgacagattgtgcggatactttagaaccaacactaacgaaattcgcatcttctggtgaagcagatgcataaaaagtaccaaccataggagaggtgataacttctaagcctgcatcagtcgtagttgtttctgcttgaggtgccgcagcttgttcagttgcttgtgcttgaactggcgctggtgtaacagcaacaggtacttctacttgaggcgcagaaaccactgttttattcttcttaagcaaaatcttactatcctttgtttctaactcaaattcatctagagttgactcgtcaatcagctcaattagctgtttaatttcatctattgataacattccatttacactccttaataatactaaaaataaaaaattgcatgaatcacgcattgtccttattgtaccatactttttattcaaaaggtgtacaggaagcgctagcaaatagaaaaaacagctgaagaattaactccagctgtaatgaactcttctttcttacgcccgagaaacatatgccgcttcggttgtattaattactagtttgtctccttcattaacgaaaaatggcacttggacaacaaggccagtttcaagagtggctggtttagaaccacctgaagaagtatcacctttaattccaggatcagttgcagtaacaactaattctactgtgttaggtaaatcaataccgattgtttcgccttgatacatgataatattaatttccatattttcttttaagaatttaagctcatgagcaatttggtcttctggaagctcaatttgttcataagactcattatccatgaatacatgatttgtaccatcagcgtataagtaagccattttacgattatcaatttgcgcttttgcaactttttcgccaccacggaatgttttttcttggattgcacctgtacgaagattacgtaatttggaacgaacaaatgctgctccttttccgggttttacatgttggaaatctagcacacgccaaataccattatctacttctattgttaaccctgttttaaagtcatttactgaaatcatgtttttcctcctgtaatttgcaaagtatctttatttggagcatattaaaactgctcattcttccttatttaaccataaaacacacaaagttacaaaggaattttataaaataattaattcttttggtgaatgaattaaaatctcattaccagtttctgtaattaaaagatcatcttcaattctaaccccgccaattcctggcaaataaattcctggttcatctgtaacaacgtgaccaacttctaatttttgagggcttttgaatgataaattaggtccttcgtgaatttctaatccaatcccgtgacctaatgaatgtccaaatgcatcgccataaccaaaggaagcaatataatcacgtgcaatggcatctgcttcaattccagtcatacctggttttaagctatcaattacttttaattgcgcatctaaagtaatttgataaatttcttttaatttttcagcaggttcaccgacagcaattgttcttgtcatatcagagcagtaaccgtcatagtaacaaccgtaatccatcgttacaaagtcgccaacctcaatttttttatcagaagcaacaccatgcggaagtgcagagcgaacacccgaagcaacaattgtatcaaacgaagatgatgtagctccagcacgtctcataaagaattctagttcattggatacttcaatttctgccattcctggtttaatgaacttaataatatgcgcaaatgcagcgtctgcaatgtcacaagccgtccgaatagctttcaattcgctcgctgtttttactttacgcatttcttcaaaaaatccagtaagaggaattaattgacgattaaacaagcgttccatttgtttaaattctgataccgttacataatccgcttcgaaatgcagtgtttttgtatcatttttaattagtaaatcttctactgtatcaaaaatcggtccttcatgtttaacaatctcgtatccctcagcttgtttagccgcttgttctgtatatctaaaatctgttacaaaatatgctttttcaggtaaaatgagtgctacaccgctagttccagtgaaacctgagacataccttctattaaattcacttgtaacaagaactgcttctatcttttccttgccaagtgtttcttgaattttagttaatttagacatttttattcccccacttttattaaattttaagtctgcaaaaatcgcattattaaacgcgttcgaaactattttatcacaatttagaaaaaataactttttttaggcgttttgcgctatacgaaaaacagtttttagcgtaaaataacatattagtaaacatgaataggctggtgaaaagtttgagcaaacaaaacgtgccatcatatggtggacaggctgttgtagaaggcgtcatgtttggcggcagaaaacaaacagttacagctgttagacgtatagatggttcattagaatatttttatttagaaaaacatagcccagtttgggtcatgcgtatgaagaaaattccttttttaagaggtattgttgctttaattgaatctagtgctatcggttccaaacacctcgcttttgcgacagaccgatatgatgaggatccaaataaccctgttgaagaagaaaaaatcgagaagaaagaatcgaaaattgcgatgtggttaggtgttgcggtaatcggtatcttatctttcgtttttgctaaatttgtgatgacgttaattccggtctttttagcagagttatttcgccctatcgttccaggcgacacagcacaagtgtttttagagagttttttcaaattgattctgctattaacttatatttttgcagtttctcagactccaattattaaacgagtttttcaatatcatggatctgaacataaagtaattaactgttacgaagaaaatttacctttaacagtggaaaatgttcaaaagcagtcacgacttcattaccgctgtggtagtagttttattttatttacagttattgtaggtatgtttatttatttgctagttccaactgacccactttggcttcgggttgtcgaccggattttacttattccagttgtactaggtgtagcatttgaagttttacaattaactaataaatgccgaaatatcccagtgcttaaatatttaggtgttcctggactgtggctccaacttcttacaactaaagagccgtccgatgatcaagtagaagttgccattgcgtcattcaacgaacttttacgtgttgaaaaagaaggcgctccagttgatgcggctgaacctgagaatctggaacttttagaataggagttgattcatagtgaagaaatatcctcttattgttattgttttactcgcgctggttggtatcggacttttaatgggtggttttaaatcatttttcatattactaatttcggttttaattggaacacttattttcaccctacttctaagactttttactaatagaaaaacagatacaaactatcaaaaagcagtgaaacaatcaaagaatttacatgacccaaagaaaaaaacgaagaaaaaacgaaaatcttcttttaaagtgattgatggtggcaaaaaataagttataatagaaaaggatgctttaaaaaaagcagttttcaggatgaaaggggtttacacaattgattagttggattatagcaattatcattctggttattcttttaggatacgaaatttaccagtttgtaatgcgacgtaaagcactaaaagttttaacagaagaagagtttaaaaaaggttatcgtaaagcacagttaattgatgttcgcgagccaaatgaattcgatgctggacatattctcggagctagaaatatcccagttacacaaatgaaaaatcggacaacagagattcgtcaagatttaccagtttacttatactgccaaacagcacaacgcagtaaccgcgcagctattatgctgtataaacgtggttataaagatgtttatcagcttaaaggcggctatcgtaaatggacaggtaaaacaaaatctaaataagaaaaagccttgccgtgagatccatggcaaggcttcttttttatacttctttttgataacgtaacactggttttctggcagctcttgtttcgtccagtcgtttcacatatgtgctatgcggcgcttcttgaacgatttcaggattttcttccgcttctttagcaattttcagcattgtatcaataaaggaatccagtgtttccttcgattctgtttcagtcggttcaatcataattgcttcaccaacaattaatgggaagtagacagttggtgggtggaaattatgatctagtaagcgttttgcaatatcaactgtacggacgccaagtttcttctgtctattaccacttaaaacaaattcatgtttgcaaacttggtcaaatggtaaatcataagcgtcttgtaatttgcgcatcatataattggcatttaaaacagcgtactctgtcactaatttcaaaccatcaggccccatagtgcgaatataagtataagcacgcacattaatgccaaagttaccataatacggcttcactcgcccaattgaatcaggataattataatcaaatgtataagcatcgtcctttttcgtaaggactggcgttggtaagaatggaattaactcttttttaacaccaattggccccgaaccaggtccaccgccgccgtgaggaccagtgaatgttttatgcaagtttaaatgtactacgtcaaagcccatatctcctggtctaacttttgccatgattgcatttaagttggcaccatcgtagtataattttcctccagctgcatggacaatttctgccatttcaacaatatctttttcaaaaagacctaatgtatttggatttgtaagcattagtgcagctgtatcctcacctactacttttttcaaatcagcaacatcgacaagtcctttttcattggatttaactgtaacgacatcaaagccagcaactgccgcagaagccggattagtaccgtgcgcagagtccggaatgattactttcgtacgttttgtatcaccatttttttcatggaaagcacgaattaacattaagccagtccactcaccgtgcgccccagcagctggttgtaacgttacttcatccattccagtaatttcaactaaacttgtttgtaaatcataaagcagctctaacgcaccttggacagaactttctggttggttaggatgaatattggcgaaaccggggaatctagctactttttcattaattttcggattatatttcatcgtacaagacccaagcggataaaaaccagagtctacaccaaaattatggttggacaaattggtataatgacgcataatttccagttcactgagttcaggtaaatctgctggtgtggaacgaagatatgcttcatcaaaatagtcacctgcatttgtttcgggaacatcactttccggcaaactaaaaccaattcttcctggaatagagcgttcaaagactaatggcattgtttcttctaaattcattttacaccctccaagcttgccacaaaggcatcaatttcttcttttgtacgcatctctgtgacagctacaagcatatgttgttcgtatttagcatcatagaaaccgaggtcataaccgccaataattccttcatctagaagcgattcatttacttctttaattggtttagaaagcttaactacaaattcattgaaaaaaccatcagaaaataatacttcaaagccattttcgcggaatttttgtttagcataatgagatttatcaagattttgtttcgccatctctactagcccagtttttccaagtgtcgccatagcaactgaagaagctaatgcatttaatgcttggtttgaacaaatattggaagtagctttatcgcggcgaatatgttgttcgcgtgcttgcaatgttaggacgtaaccacgtttcccattttcatctaccgtttccccgactaaacgtccaggaactttacgcattaatttatttgttaccgcaaagaaaccacagtgcggtccaccaaatgattctggaataccaaacacttgggagtcaccaacaacaatatccgcaccaaattctcctggtggcgtcagtaagccaagagatagcgggttacttgaaacaagaagtaaagaattattttcatgaaccaatttttctaattctgctaaaggttctacttggccataaaagttcggatattgtacaacaaaccctgcaatatcatcggaaagagctttttttagaacatctatatccgttttaccatccacttcaggaataacttcaacttcaatatgttgacctgtagcgtaggtttttaggacattaatgctttctggatgaaccgcccctgaaataaggatttttttgcgtttagtatgtccgcttgctaacatcgctgcttcggcaagagctgttccaccatcatacatggaggaattcgctaaatccattccagttaattctgcaatcatcgtttggaattcaaaaatcgcctgtagctccccttgcgaaatctctggctgataaggcgtataagctgtatagaattctgaacgagaaataacgtgatctaccacagttggaatatagtgactatatacaccagctcctaaaaaggatgcatattctgaagtattggcatttttagaggcaagtttagataattctcgtaacaacgccggttctgattttgccggttttaaatcataatcccgcttaaatctaattttttctggaatatcttgaaataagtcatcaatcgacttaacccctatcacttcaagcatttccttctcatcttgttccgtcattggtaaataacgatgttttgccatattatttcctcctttttactttgcgcgtttataaaatggtgtttgtactacttttgcttttactttcttatttcgaattccgacttctagttcttggtctaattcagtataagcagtatctattaacgctaaaccgatattggtgccaagagttggagattgggtgccagaagtgataactccaatttctttatcatttagaaatactggatagtcgtgacgcggtatgcctcgctcaatcaattcaatcccaactaattttctcgttagtcccgcttctttttgcttgataagtgcttgttttccgataaaatctgcttctttttttaatttcactgcaaaattaagaccggcttcaagtggagtaatatctttactcaattcttgaccgtaaagtgcaagaactgcttctagacgtagcgtatcacgagctccaagaccgattggcgctacaccttcagccaagattgcctcgaatacttttccagcatccgcactttgcatgtatatttcaaaaccatcttctccagtgtatccacttctcgatataattgttttcactccagcaacatcagcatcttctataaaaccaaagaagcttatagagcttaagtccgcatctgttaatttagaaaggattttttctgcatttggtccctgtaaagctaactgtccaaactctgaagaggcatttttaactgtaacatccccaacaatattttgaaccatccactcataatctttttctgtatttgccgcattgacgacaagtatgtattcggtttctgatttcttataaacaactaaatcatctactgttccgcccgtttcatagcacataatattatattgtgctttccctatttttattttctctatgtcgttagataacaaatactgtaaataagaagtactgtcaggaccttccaccaaaatttcgcccatatgggacacgtcaaataaccctgcatcagttcgcacggcctcatgttctgcttttattccagcaaattgtactggtaaatcccatccgccaaaatcaatggttttcgcaccatattttgcatatagtggatgaatcggtgttttaagtaattccgtcattattatatcctcctttttcacataacaaaaaggcttatatagttcataagccctgtcgtgacataaaaatgactccagagttgcgtcccgtaaacatccttttgcctgagagtttcacataacttatgctttccccgtcggcgctgcttttcacagtctctctgtttacattcacccgctaattctattatgtatctgccttttctatagcttatcacgagttgtattgttcggcaaataattagttttattcctaaaaaattcttattttaatagcttcgttcggaatgtaagggctttatcttcatttcatctatctattatacgcttgttacattatgcacaaagattgtgaaaatataataaatgtgaaaaaagttttttctatgggctgagatacactaaaaagattttttaataaagcattttctatcatctgactctttttaactaagaaaatcgctttttagtttttgtgaaaaatcgtataacaaaggattttagacacagttgtagaatatgacttgtaaggaggttgttatgccacaaaaactaatgaatcatattacatctcaagcacttcgggttaatgcaagcgatattcatatccaccctttaaggaaccgttatttgcttcgtctccgggtcaatggaacactaatgccacttctctatctctccttcgatgttggagaaaagctaatatcatttctcaaatttcaagctgctctagatataagcgaaaaacgaaagcctcaatctggtagctacgagaaagaaactaaatctgaaaaaatagctttaagactttctaccatgcctaataaagactttcacgaaagtatggtaattcgtatttttcgctataaatacccaatcccttttttaaagtcttgtctatttcctaaggtagctaaacaaattttacaactatgtaataaccaaacaggattgtttcttttttcagggagcaccggtagcggaaaatcaagttccatgtatagtttagtttcctctatagaaaataaaactgaacttcaagtaattacaattgaagatcctgttgagcactattctcctggttttctccaagtggaaattaatgaaaaagctaatatcacttatgcccccgttgttcgttctgttcttcgccatgaccctgatattcttatagttggagaaattcgcgactttgaaacagcaaaaattgtagtacgtgctgctctaacaggtcatttggtatttagcactgttcatgctggtgatacttatggagttttattaagattgcttgaatttggcgttagcaaagaagaattagctcaatgtttacttggtattagttttcaacaattatcccatttatattgtgtctattgtggttcaaagtgccatccactttgtagccatttacagcgaaaaagaacagctatttatgaagtaatcactaaaaaagatatacaaacttattttaattcaagttatcaacaaaacaaacctaaatatacattagatgcaatttatcagaaaggggttgcttatggctttttttcaccggattaattggaaagacgatggcgaatttttaataagaattgctagtttacttgataaaggcttttcgttggagtcagctattagttatttaagcatcaccactcctaaacatagcgagcgatataggcaaattatcgcttcccttgcagttggcaactctttttcttatgcccttagacaaagcgagtttccagagtttatttgttctcaacttcattacgcctctaatcatggtttttttattcaaacaatccaagaaacaggcattcatatgaaaagaaaagctgaagaaaaaaacgccttaatgaaaacatttcaatatccactagttttattttcaacagttattgtagtatttttcttgcttcgaatatttcttttaccaaaattcgaacttttattttcgcaacttgcaagtaatggttcacttggcactaatttcacttattttttgcttgaaaaaatgccgattatattaggtgctattttgctcactctctttctatttgttggttttattattagaaagcaaaataaaaaatcagcttatgaacgcgcttatttttattgtcgtgtcccttatataaaacagttcgtcaaaatccattattcgcaatatttttcacgagaaataggttacctattaaaaagcggcctttctatttctcatgttatgcaattgtttgcgcgagatgactccccggctttttttcgttcgatagccaagcatattattccttcacttgaagccggtttatctttaacaaacgcattagaaaaaatgcctatttttgaaaaagaactatattacattgctatacatggagaaaaaaatggtaatttagcagaagaatttttattctattacaatttatgccatcaaaaagttttacaaaaaacagaaaaactattttcatttatccaaccaattgtttttataattatcggagttttaatcatatcgatttatttatcaattttatatccaatgttttccatggtaaatcaaatttagaggaggagttctaatgtataaattcaaaatagactggaaagatgatcgaggctttaccttagtagaaatgctcatcgttcttttagttgtcagcgtattattacttctaaccattccaaatatcgttacacaaagtaaatctattaataacaaaggttgcgaggcttttatttcgatggttcaaggacaagttcaatcataccagctagacaaaaattcgataccgtcaataaatgacttagttagtggtggttatttaaaatccactcaaaaatcttgtcctaatggaaaaagcattaaaatagacagttcaggaaatgtttctgagaataaatgaaaaagaacgccttcactttactagaaatgttactcgtcatatccattagtctcactatgattaccctaactatttatccaattgcaaacactatcactgcacttacagagaaacaactattagaggaagtaaaagccgctatttaccttgcccaaataaatgctataacatcaaaacaagatactaccatttcttttattcctaatgaaaatcaattcattgcgacttataacaatcaaccacttatcactattccatttggaactactttaagtttacaacaaacaaaaactgagaattatcgtttttctagtctagacggaactatcaatcgtttttctacgattcatctttcaggaacaaataaaaattataagcttatattccaaattgggaaaggacgttttcgtgttgaataaggttaatggattctcattagtagaaagtatagtttctttactgcttttctctattgtatgtagttttttgttgcctatttccatgactatttttcaaaagctagatcagcagaaagaaattagtcaactatatcaacaaattttcgaacacagcgagctattgcgttatagaagtgttccgattattttcagtgatgagcaaataaaaagcttttattatcaaggaggtatccaagtttgtgcaaaaactaatacaattgaaaaatgtacattatagaaagagcacatcagccttcactttgcttgaaacaattctatcgatcaccatcgtttaagtatcagctctcttattccattatttttcgaatgttatcataaaactatccagcttagtaatttagatcaaacaagtgaatggcaattatttttggtacaaactcggttagaattagaaaaagcaacaaatatacaagtacatccagaaaaactctctttcaaagtaaatgataatctcgttacttattcaaaatacaataacattctacgacggcaagtaaacggtaaaggacatgagcctttattacacaaagtaactaattggcaaatcaccaatgaggaaaaccagcttattttaaaagttactttttccaataataagttctatacttccaaattccctctgacgaaagcgaatgaattctaatgaaaaataatggatttacgctcccgtttatactttttatagcgttgattacaatattaattgtgacaggtagcgcttcaatttttaagactcaaattcaatatgaaaaacaacttcaaaactattatttagcatctgcagagttgaatttagcactgttagtagcaaaagatgattcgatgttagccaaccaacttaacatagaatacggtagctcaataataaaatgtcaatcaactgacgatactttatctagctttaactgcaacatcaccctagaaaatggttatacgctaacaaaaacaacgaacccataagcaagagttcgttgtttaaaaagatttagttggtgtattgattaaattatacattttgccagttttcgtatctataactttatcaaataaataaccatagagaactaagtctcctgtttcatacgataaaataggttgattatccattaattctagtactgtcgtttcttttttgtttgtcggatcaacttttactaatttatattcatgtggtccactgcttattttttgactcttataaggtacaaaagttaaaaaagtatttttatcaaaatttatatcaaaatacgggataaatgttcctaactcatcatactctcgtgctgaatcataagagaaaaaattttgaaaacctattgttctaaaaacatacaataatttttcattcgaagatttctcaatcgtaagcaaaacattatcatgtacagcaaattgcattatattagcaacaattaaacttttagtggcattatctctaatatcttgtaaatataagtttcctaattcatcatctggtttatctttattatttgaaataaccaaattatcaccataccaagaaataaacggagatactaaatctacattatcaacttgattagttgtataatcccagttctcaatatgaaaattccactgaggactataagtcacaaacattattttttcaggcgattcatcgttccaatagaaagttgtcgttagtggtttagtttctctggacgacactatcgaaccatcatttaaggcaatgattcgcatggttgcttttttgtctgactcagcagaataaagcaaaatatttcgataatctggactaatttggacttctgaaatagattcatttgtattaaagatagcacgctttttttcattataaatatctaattcttcaaagtaggttgtcccatgttttttggtttgtaacaaaacagtatcttttgacaaccagccaacaacacgttggaattcttttgttttaatttgaacaccctgaacttcttttgcagtcttttttggcgtttctttttcctctgagcaaccaaaagagataaaaaccaagcccattaacaaggtaattagcaaaaaagcttttgattttttcatctctggcctccaatctctctatgctagaattttacccttttcatagtaagctaaaacaatgagtgatagaaagatcatcttaagtaagataagctacaataatggagtgttattgtagcttataaaaattattaatcttcaactggtaatgccaaccaagcagcacctattatcccagcgtcattcccttttgtcgcaatggataatttagtggattctttaactgctggaaataccattgtctcaaaataatttctgacaggtgttaaaagttgatctcctgctgctgaaactcccccgccgataatgattttttcaggatttaacatgttgccgatgtgactaagtgctagagccaaatagaaagagattttatcaatcgtttcatttgctaatttatcattttctgcacctaattcaaaaattaatttagaagtaatagtttcttgtttattgatggcttctttaagtgctgattcaccagtaaattcttttgctagatcttttgctacgcgcacaataccagttgcggaagctacagtttctaaacaaccttttttaccgcaagtacaatcatagccattttctggaacaactgttacgtgaccgatttcacctgctgcgccacgaattccgtgcagaattttaccttctgcaaagattccgccgccgacgccagttccaagtgttacaaatacaacattcgcaccaccttcaccagcacctttccagcgttcacctagtgcagcaacattcgcatcattatctaattctatttttaagccagtaattttttctaagtcttcgctaacattttgttcttcggcccagccaaggttatatgcacctttaactgttcctgtttcgtaatttactgttcctggagttcccattccaataccgtaaaaaatgtcattatccagctgtaagtcagttaatttttgattaatagagtcaccgatgtcttttacaatatgagcacctttatcctcaatatttgtatcgatagtccatttttcttcaatgtcgccttcttttgttaaaatagctaattttgcagttgtcccgcctaaatctacaccaattaattttttgttcattctgctgttctccttataatcaatttaatttaaactactattttttcgttgttctttgattaattcttgtttcaatatactgcgagctctagcaaaaacttctctatctaaaatattatgcttaaaaagttctgtgacttcatattccatcatttcgatgtcgtattgtcgctttcctaaataaacaattatgccatgctttcgtaataattgagcaacatcataaactgttttcacattaaaaacctcttattctttgcttttttctaactcatcataataagaatcaaaaaacggattactggataattgtttagcagtatcggcttctttaagggcgccctctatattaccttgtactctataacaaaaagataaataataatgggcttctgggatgtcattatccagactaattgcttcgttcgccatatcttctgccttatctatttgcttattttgtaaagcaatagatgatgcataagtataagaatagccatcagcacttccgctttcaattaaattatctataatttttgtagcttcttctttgttatgttcttgcaaatattgttgaactgctatattggctggcataggatcataaggctgttcccctttttggaaaccaaaatataaaaagaggatagctactgcaacaagggatactccataagcaagtctacgccaatggaaaaattgtttcggtaatgataatgctcccgcgagtaaaaatccgccaactaatccaccaatgtggccagcaatatcaatttgcgtagagaagacatctatcagtagattaatcgctactaaggaagcaatacttgttccaattgttttcgcataaagatttggttttaatacaactaaatataacagtgcacccattacagcaaaaactgccgtgctagccccaacggataaattcatatttaacgcaaagcttgctatgttaccacaaataccacctaaaagaagtataagaatatatcgccatttaccataaatacgctctgcccaagcaccaacaatatagagcattactgcattggatgcaagatgaattagaccgctatggagaaaaattggtgaaataaagcgccaccattccccggcataaataagtgggttgaatttaccgccccatttaattaagttaaaagtatctgttgagccaccttggaaggtaacccatagaaatgctgcaactataagtccaataaatgaatacgtgacaattggtttagaatttctggctactttttgttcttcatttactttagtagtaatataagtgattacttgttcgcgttcttttgctaccatttcttttgttatttcattaggaagaataaatgcttcttctggtacatctagtttttttataagtaattcaaggtgctcctgcatctgctcgtttgcaagtaatatattttctaatttcactttttcgtttggagacgcaatggtttgtccaaaaaaaggcgaaatgtcacccataggctcaaatggagttatatatatattaacaagaggcaattttaagcgtcccatttgcttacgaaggttttcagttacatgtaatgtgtgggtcacatcacgttccaccacatttgcccaacttaattctttcatctgaatacggatgactggtctttttttctggctggtattttctaaccaaagttcttgtttctcctcatgaagatggatcaaacggtatttttcaacacccaagaaatagttagttaggcgccagaagacatattgttcttggaagctcaaaaaattccctgctttcattacaaattatatttactactatacgcaaaaaaaggggcgttgtaaacaatccactctattttctatagaattatttttatctatccttcaataagaatagaaacaggtttatcatggctttctggagtgaattctatttgttgctcatataaacacaaagagactgtttctcctttaaaatcggctaaaaatctatcatagaagccgccgccaaaacctattctaaaatgtgctttattaaaaacaactcccggaactattaataagtcaattgcatctttatcgactgtttctgctaactcatgaggctctaaaataccaaattttgttttagtaagcggatgactagaatccatttttttaaattccatttttctacttggataaaaagtttttggaattaaaacggtctttccttcttttttcgcttgaagtattattgtttctgtttcaatctctggatgtcttgctagtgtaatcccgattacttttgcttgattccactctggtaacagaaatagtttttctgcaagtttaatagaacgttctcggtgttctactttatcaatagtgtttaaattacgcaaaactttctctcgaataaggtgtttgtctgccattttgacttcccccttttttataataaaaaaagcaacagaatggagatcctgctgcttacttagtttcgcggtgtaaagttacacggcgcaatcttggacaatatttttttaattcaatacgttccggattttcacgcttatttttagtagtgatataattacgatcaccgcattcagtgcattctaaagtaatattaacgcgcattatttttccctccaactccgactgacgaatttatttactaaacctgtataataatatcatttttacacagttgttgcaaggactctatgcattttctttttattttctttacaaaaccttatttcggatggtgttttatgttaaattatgctataactagtagtagagtttatggaagagaggtgtttataaaacccatgaccacagtcataattatcttattaattgctgctattgcgctgtttgtcatttcatttttacaaaaaggtgataataagcaattagaaaaagaactggaagatgttgctgctcagtggatgcaagaaaactttgaattaaaacaacgtgtctctgaattagaaaaagcaatgaaaatggatgcccctaccgttgaggttgagcaagttcctgaaagtcctaaagttcgcgaattgatgaaaaaacaagtgattaccctttatacttctggaatcgtaacttcagaaattgctgaacagtcatccctacctaaagaagaagtagaaaaaatcattgaagaatatttaaaacattgatttaaattttaaaggaggagcctatctgtgaagaaaaacttacggatgttggcgctaggtttcttaatttctgccgttgtcttactggtttataatcagtttttctcaactcagaccaaagcagatgaaactaaagtcacatcaaaaaaaactggttctgatgaaaactcaaaaacatggaaaagcaaatacgaaaaattattagctcaacaagaattagataaacaagcagaagcggacgcaaagaaaaaagccgaagaagctgctaaaaagaaagctgaagaagctaaaaaagtaaaaagctatacattaacgatttctagaggagatccctcttccaaagctggcgacgaacttgaagcaaatggtatcgttaaaagttcttcagagtttgataaatacttaagagataataattatgaaaaatacattcgtgacggtagttatacgctcaagagcgacatggattatgaaaaaatcgcaaaaatcttgacacataaagattaattattaaaaaaggaaatgagtctagaacttatttcctttttttgttattatttaagaaagaaaggatgatgagatatggaaaatgtaaaaatgaaaaacctcataaataatacgggggtattttacctatagaatgctcccgacttacaaaggagcgaaacaattgatacttgaaaaatatggttttacaagtttttttgaagaacaaaaaattgctgctacttcttcatacgggagagttacagcggtatttagagatttttatcgtgttataacggaaaatggggaatttttagccacgcttaaacgaggaaatttttacgaattatccccttctaatttgccagctgtcggcgattttgtcgaagtaagcaatgagaaacaaattttatctgtattacaaaggaaaacaattttttctcgaatgactaaggattcagaggaacaattaattgccgcaaattttgattatgcgcttattgttatgagtttgaaccatgattttaatttaaataggctagaacgttatttaacggttgcttgggatagtggtgctacgccaattatcattttaacaaaagcagatttagttgatgaccttacgcccttcactatggagctcgaaacggtcgcttatggcgttcctacttattatgtagataatttatcgcaccgtggttttgaagctctggaagctgatttgaagccgaatagcaccctcgttttactcggatcatccggggttggtaaatcctcctttattaatagtcttgcaggagcggatctgatgaaaacttcggagattcgcgaggatgatagtaaaggaaagcatacaacgactcatagagaaatgcacttgcttgctaatggttggattattattgatacgcctggtatgcgtgaattcgggattggtttaaatcaagctggtctagaaactacattttctgacgtagaagaattaagtaaagattgtcgttttcacgattgttctcatacaagtgagcctggctgtgcggttcaggaatcattagcagatgggacgctttcgctaaaacattatgaaaattggcagaaattacaacgtgaaatggcttatcatgctcgaaaaaacagccctgctttagccagacaagaacgggatcgctggaaaacgattcaaaaatcacttcgaacacatttaaaaacacgaccaaaaagataatagcaaaaaagcaagtagttaaaaactacttgcttttttgctattatttagactcaggcttttttgttttagggtagaattttttctctgcttgaggttttttgtcgccttctggttgttcttttttctctagcaatgctttacgtgataagttaacgcggccttggtggtctacttcaataactttaaccgttacttcatcaccaagttttaagatgtcttccactttaccaacacgttcatgtgctaattcagaaatatgaactaaaccatctgtacctttgaataattcaacaaacgcgccgaatttttcgatacgacgaactttaccagtgtaaacttctccaacttctacttcacgaacgatgtcttcgatgatagcaattgctttacggttcattgcttgatcttgtgaagcaatgtaaactgtaccatcttgttcaatatcaatttttacgcctgtttcttcaatgattgcattgatttgttttccaccaggtccaataacatctttaattttttctggtttgatattaagcgtaataatttttggagcatacgcagaaagttcttcacgaggttcgctaattgtacttgttaagtgttctagaatatgcaagcgaccttcttttgcttgtgttaatgcttcgtctaaaatttgacgacttaagccatcaattttgatgtccatttgaagtgctgtaataccatcttttgttccagcaactttgaagtccatatcgccaaagtgatcttccataccttgaatatcagaaaggattgtgtagtcatcaccaagttttacaagacccattgcgataccagcaactggtgctttaattggaacaccagcatcaagcatagcaagtgtagatccacaaatacttgcttgagaactagaaccatttgattcaagaacttctgatactagacggatagtgtacgggaattcctcttcggaaggaataacatattgtaatgcacgttcacctaacgcaccatgaccgatttcacgacgacccggcgcacgacgaggaccagtttccccaacactaaattgcgggaagttataatggtgcatgaatcgtttatattcttctgttcctaaaccgtcaatgatttggtgttcacgaagcggcgctagtgtacatacgcttaaagcttgtgtttgaccacgagtgaataaacctgaaccatggacacgtggaagcataccaacttcagaagaaagtggacgaatttcgtttactttacgaccatctggacggattttatcttgagaaattaaacgacgcatttcgtctttttcaatcatttcaagaatatgagctacttcaccaagaatttctgcttcattttctaattcttttgctttatagctttctaaaatttcttcttttacttcttcaattgcagcttcacgagcttttttctcttctgttttgatagctgctttcattttaccttcacttgctgcttttacttctgcttcaagttcaggatcgcttacgaaaagttcgatttcgcgtttttctttaccaactgcagcgatgatttgttgttggaattcacaaaggcgtttaatttcttcatgtccaaacataattgcttcaagcattgcttcttctgaaacttcttttgctccagcttctaccatgttgattgcatcataagttcctgcaacagttaagctaatatcacttttttctgcttgttcaatagttgggttaataacgtattttccgtcaatacggccaacatcaacaccagcgattgggccttcaaatggaatatcagaaataactaatgcaacagaagatccaagcattgctgccatttctggagaacaatcttgatccacactgaatacagtagaagtaatttgaacttcattacggaaaccttctgcaaataatggacggattggacggtcaattaggcgcgctgttaatgttgcacggtcacttggacgtccttcacgttttaagaatccaccgggaactttacccacggaatacattttttcttcatagttaactgttaatgggaaaaagtcgccaggacgtggtttttttgaaccaactgcagctgttaaaacgacagtatcgccgtaacgaattaaggctgctccacttgcttgttttgctaattgacctacttcgacagataatgtcttacctgcccattctgttgaaaatacttgtttttcagacatattttaatctcctttgattaggaaaaacacgaaccagaaactttaccatgcataagaatgttcacgcacactttagattttctaaagcacacatgaatccaaaaacctgctaaaaatagcgatttttgaagcacgtttttggattcatgcgataaagtttcatttcttcggcgtgttttccaaaatttagtatagttaatactcaaaaaaaagcgggaacttttggtatcccgctttcgtctggtttttatcgacgtaaacctaaacgtttgataagttcgcggtaacgttgaacatcttttttacgtaggtaagttaataggttacgacggtgacctaccattttcattaatccacggtaagagtgatgatcttttttgtgtacgcgaacgtgttcatttaagctattgatttcagcagttaatacagcgatttgtacttctggtgaaccagtatctgtatcatggacacggtactctgcaataatttcatttttgcgttcttgagttaaagccatttctttccacctccttctaaaatatccccgattactgagccaagcgtcggtgagtcgcaaaagccaagtaatggttctgttcgtacagatttaaagatacactatttagcctccaaaagcaagcaaaaatagtcgtttaatcttctaaattcgcaaaataagctcttgtatcttcctcgtctttttctaactgagcaatcaaaccttctaccccattaaatttaagttctgggcggaaaaattgataccattcaatctctgcttcttcgccgtaaatttcgcggtggaaatccagaatataaacctcaatagacaatgcttggtcatctttaaaagtaatgttataaccaatgctcgccataccaagatgcgtttcaccgttcacacggaatttcactgcatagacaccaagctttggaatcaaataatcttcattaacaagtatatttgctgttgggaatccaatagttctgccgcgtttatcaccatgaataacggttccttttgttgtataaggatagcctagtaattggtttgcttcttccagttcgccttctgtaattgctcggcgaatgttagttgaacttattttatcactagcacctgtttgtttatccacaataggtacttcaaaacgaccatttgcgtagttttctaattccgacatttttccttccgctttttttccatacgaaatagttcaaaccagctacaacatgttttacatttaatgcaccaaggtaattatcaacaaccgctccggggtgataactcccaaaactgtgtagtaaaacgaactacatacattatatcaacgccaagattagccattttttctgctttatcttcgagtggcgttaaatatttcacttgtttccgaatattgcttaaaacgacagatgggtgtggatcgaacgtcaatactgctgtttgaagtcctttttcttcagcaatctgtttcgcttgtttaatgactgcttgatgacctaaatgaaccccatcaaagaacccaagtgccattactttttttacgtcagtccattcatccgttgtaattggatgatgtaagtatatcgtcttcattttttgccacttctcctctaaattcgaattcctctaatatcataatataagaaagttgcagtcgcaattactatgcttgttgtaactcaatgactttttccggtttaaagagatcttgtttctccgggtgtggtttataaattgccgttaatttctcttgaaaaataagtgcgacacgaggttcgttttcaactgtttggaataaagattttggtaataatacgccgtttaaaacttttgcgtgtatttcttcatctatttctagttttgccattgattcaatgcctttttcaagcggatataaaaaatcagtatcatttgcttgcatcttttcatcaatttctgccagggttagacaatcttcttttttgaaaaagccgctacgggtccgttctagtttggacatatgggctggataccccagcaattcgccgatcatgacagctaatgtgcggatatatgttcctttaccacatgaaatttctaatttaaaagtcggatttgattcagttagcggactgacgccatctaaacggactaatgaataaatatccacttgtctggatggtcgttctacctctattcctgctcttgcatattcatacaacttcttaccgttaacctttacggctgaaaacatcggtggaatttgtgtgatttttccggtcagctttgtaagggcagcttgaagttcttctgctgaaatttcggctaattccttcgttgcaacagtttcgcccgtggcatcttctgttgttgtggatttacctaatgttatttcagctacatatacttttccttcatctgtcacatattccgccaattttgttgcacgaccgatacaaattgggagaacgccttccacttctggatcaagagtaccggtatggccgactttttttgtatgtaaaatttttcttaatttaaaaacgcaatcatgacttgtcattccgcgttctttccacagtgggataatgccgttcatctagctcctccttctaagaaaaaaagtttaagacaattctccacttacatcccgtttgaatgagaagataaagggattgcccttaaacttttatttattattgatcgttatttaagtcacgaagcaattcatcgattcgatttccgtaagcgatggaattatctatttcaaaagacatttctggaactttacgaagtcgaatacggcgaccgatttcagagcggataaagccatgcgctttctcaagtgcgagtaacgtattttctttttccttatcggtaccaagaatggaaatgaacaccttagcttcttgtaagtccccagtaacatctactcccgttacagtaacaaaacctaagcgagggtctttgattttacgatttaaaatatcgcccaattcttttttcatttgttcactgacacgatttgctcgtacgttcaattgtattcacctcttttataacttctccattactgtctcagctcgctcccactctggaaaagaatctaggaaagcaagtacttctctagcttctttttcagcttggatatgcgaggcggatacaacagcaaagctaatttcagttcgctgccataaatcctgataatctgtttcagcaatggagatattgaatttttgctttgttctcgttaaaattcgttgcagtatagcgcgtttttctttgaggttttgtggttcctgcatgaaaaattcactaataactgattgaatcattttctttcaatttcttccataacgtatgcttcgattacatcgtcttctttaatatcgttgaagttttgaactgtaataccacattcgtaaccttttgctacttctttcgcatcatctttaaagcgtttaagtgttgcaatttcgccttcaaaaacaacgattccgtcacggataatacgaacgccactatcacgagttattttaccatctgttacgtaacagccagcaattgtacccactttagaaacattgattgtttgacgaacttgcgcttgaccaataattttttcttggaattctgggtcaagcatacctttcatcgctgcttcaatttcatcaattgctttataaataacacggtgtaaacgaatatctacactttcgttttccgctgcttcacgagcttgtgttgttggacgaacgttaaatccgataataattgcattagaagctgcagctagagtaatatctgattcattgattgcaccaacggcagtatgaataattttaacgttaacgccttctacgtcaattttgcgaagtgacgcagcaagggcctctacagaaccttgaacgtctgctttgataataacgttaacttctttcatttcgccagctttcatatgttcaaataagttatctaaacttacgcggtttgttgctgaacgttgagctacaagtgcgcgacttgcgcgagtttccccgatgtttcttgctgttttttcatcttcaaaaacaacgaagcgatcgccagcttgtggcacatcatttaatccagtgatttcaactggtgtactaggtccaacttttttcacgcggcggcctaagtcattaaccatggcacgaacacgaccaaaagtattccctacaacgattggatccccgatattaagcgttccatcttgtactagtaaagtcgcaactggaccacggcctttatcaagttctgcttcaataacagaaccaattgcacgacgatctggatttgcttttaattcttctacttcagaaacaagtaaaatcatatctaacaagttctcaagaccttcaccaaatttagctgagattggtgcgaaaatagtatcgccgccccaagcttctggaactaattcatactcagttaattcttgcattacgcggtctggatttgcttgtggtttatcaattttattaacagcaacaataatcggcattcccgcagctttcgcgtggttgattgcttcaattgtttgtggcataacaccatcatctgctgctacaactaaaatcgtaatatccgtgatttgcgcaccacgagcacgcattgctgtaaacgcagcatgtcctggagtatctaggaaagtaatttttttatcgtgaatttctagttgataagcaccaatatgttgtgtgataccaccagcttctcctaaagtaacttttgtattacgaagggaatctagtaaagttgttttaccatggtcaacgtgacccataatcgtaacaactggtgggcgttcaacaagtttagactcgtcaacagcttcatttagttcattttcaaagtaaacatctaagtctgttacatcgactttgatttcttcttctacttgcacaccgtaatcatcacaaattaattcgattgcatctttatctaatgattggttaattgttgcaacaacaccaagcataaatagttttttgattagttcagatggttctctatataattttttagctaattccgctactgttagagattcgctgaaaacgattttttcaggaagttcttttggtttcggcggcgttggaggtactgtactgtggtttaatttaccttttttcttcgtgttacggcccttattgttaaaattgccgccacgattcggacgattgttgccgcctggacggtttggattgccgccgcctggacgattactgttgttattgttgttgcgtttttgtccgccagctggttgcttattgccgcttgattgtgtctgattacttgtgtttgctggtttatttgtcgctggttttgcaccgtggcttttgtttgcagttgctggtttattagcttgtcctgctggtttatttggtttattcgacttttcattactatttgtcatatttggtttgtttggccccttactatttccattttcgttgctagtagtttctttcttgggtgcttcggcttttttatttgtaccatcaatagcattatctaattgtcttaacgcattttcattaatagtggacatatggtttgccacttcaatacctaagtcttttaatgcttcaatgacttttttacttgatacttgatgttcttttgcatattcatatacacgaactttactcatgtcgtacacctccgtataagattcaaccgagtaattctgctaacttattagcaaatcctttatcaagtattgcaactattgcacgtgtatctttgccgattgcaccccctatcatttcccgggtaccggcctttttcacgacaacattgtagtattcacacttgttgcggattgttttctcggttttttcggatatatcttctgaaatgagaacgagtttcgctttcccatttctaactgcttttagtactaattcttcaccagtggtaattttacgtgctcggttagcaaggcctaataaggaaagtgcttttttatccattagttggttcctcgagagtcttcacataagcaattagctcatcataaaaggactcttgttccggcatttttagttgatgaaaaatagcgtttttctttttcgctttttcacaagcttctacatttttaacaatgtaaaaaccacgtccaggggcttttccagtaggatctatcgtaagcgctccgtctttcgaatacgcaatacgaagaagttcgccttttggcaagcgttcaccggtaataatacattttcgaagggggatttttttattacgcatgataattctcctttttactcttcatcttctgtaaaagtttcgctctctgcttcttcaacaacaggtgcttctacgtcattacgagggtagatacctagttcagttgcaactgtttcgcttttaatatcgattttccagccagttaatttcgctgctaaacgggcattttgaccacgtttaccaatagcaagtgataactgataatccggtacgataacggttgaagcttggtctgcttcgtttacaataacatctagcacttttgaagggctaagagcattggctacgaatgtgaaaggatcttctgaccattcaacgatatcgattttttcgcctttaagttcattgacgatagtttggacacgtgcgcatttaggtcctacacatgcaccaactgggtccacttcttcatttgctgtgtaaacagagatttttgaacgatctccagcttcacgagcaactgatttgatttctacaacgccatcataaatttcaggtacttccatttcaaaaagacgtttaagtaagcccggatgtgtacgggatacaaagatttgtggtccttttgtagtcttttctacttttgttaaatacactttaatgcggtcatgtgcatgataagtttcgtttggcatttgttcgttttgagataaaatggcttcgattttaccaaggtttacatagataaaacgagaatcttgacgttcaacaataccagtcataatatcatcttcacggtcgatgaactcatcataaatgatgccacgttccgcttcacgaacacgctgagtaacgacttgtttcgctgtttgagcagcgatacgtccaaaatctttcggtgttacttcaagttccacgacgtcacctggtttgtatactggattcagtttgtgcgcttcttccatcgaaatctcaagacgagagtcaaatacttgctctaccgcttcttttctagctaatacacggatagaaccgttttccatatttaaatctacgcgtacgttttgtgcatctttgaaatttcgtttatatgcagaagtaagagcagcttcaatcgcttccactaaaacctctcttgaaatacctttatcatgttctaacacatgaagagcatctaataattctgtgctcattttttattcagctccttattctttgctttttaaaattgaattgcgagtcttgctttggctactttgtcttttggaatttcacaagtgattttgcgtgttttatctgtgatagtaatgacaagtgtcgtgccgtcataactaacaagcgtcccttcccacattttacgaccatcaattggttcataagaagtcacatggacatatttacctaccgcattttcaaaaatctggctctttcttaagcggacgttcagcccctggtgatgaaacttccaaaaagtaattttgtgtaattgggtcagattcatccattttttcgctaactttttcacttacagctgcgcattcatcaatgtccacgccaccatctttatcaataaaaattcgcaaaaaccagtttggaccttctttttcaaacgcaatgtctacaagctccaattgaagttcatccgtgattggcgcaacaattgcttctacttgttctagtactttactcatttcagcctccttaagagatacgcttttccagctaattcgtcccctacttctgccacaggtgactctttgacagatttgcaaaacgaaagcgtgggcattggcccacgcttggctgagttatcgtagtatttcttaaataagtttatcacaaattgtgactacaagcaagttttgcccatttttagaacaatgacagctgattttgatcaggcaatccttccaagcatccttggtcatccatgtactgaataatcgtttttgatacttttccgcgttgttgtaagtcttctttggataaaaattccccattttcacgagcggcaactatttgtttcgctacgttggttccaaggcttggaatcgcattgaatggcggaataagtgagtctccatcaataataaactcatcagcagacgatttatacaaatcgactttttggaaatggaaaccacgagcaagcatttcgttcgcaatttctaaaacggttagcaagtttttctctttcgttgaagcttccatacctttatcgtttacttctttcattgtagcttttaccgcttctttcccgtttaccatagacgtcaaatcgaagtcgtcagcacgaacggtgaaataagtcgcgtaaaaatataatgggtgatgtactttgaaataagcaatccgaaccgccattaaaacgtaagcagcggcatgggctttcgggaacatgtacttgatttttttacaagattcaatgtaccaaagcggcactttatttgctatcattgcttcttccatttcctcggttaaacctttccctttacggacagattccataattttaaaggctaatgaactttctaatccttggtaaattagaaataccataatatcatcacgacaaccaattacgtctggtagttcgcatgttttatttttaattaattcctccgcatttccaagccaaacgtcggtaccatgggaaagaccagagatttgtactaactcagaaaatgtcgttggttttgtttgttctaacatttgtcgtacaaaacgagttccaaattcgggaattccaagcgtccctgtttttgaatcgatgtctgctggtttaacaccaagcgattctgtggaaccaaataatttcattacatctggatcatctgttggaatggttttcggatcaataccgcttaaatcctgtaacatccggatagcagtcggatcatcgtgcccaagtatatcgagtttaagcacattgtcgtgaatcgagtggaaatcaaaatgggttgttttccattctgagtccgttgcatctgctgggaactgaacaggagtaaaatcataaacatccatataatcaggaataacgataataccacctggatgctgcccagtagtccgtttaacacccgtacatccagcaacaaggcgatccacctcagccccgcggatggtcatattcatatcacgttcgtaattccgaacatatccaaatgcagttttttcggcaactgtaccgatagtaccagcacggaaaacataatcttccccaaaaatttcttttgtataggcatgggctaccggttgataatcacctgaaaagttcaagtcaatatcgggtactttatcccctttaaatcctaagaaagtttcaaaaggaatatcttggccttctttttggtaaggcgttccgcagtgcgggcaatctttatcaggtaagtcaaaaccagaaccaactgaaccatcatcaaagaactcagaatccttacaattcgggcaaagataatgtggtggaagtgggtttacttcggtaatttctgtcattgtagcgacaaaagaagaaccaaccgatccccgagaccctactaaataaccatctacaagtgattttttaacgagtttatgtgaaataaggtaaataaccgcaaacccgtgaccaataatacttttcaattctttttccagtctagcctctacaatttccggtaatttttccccgtataattggtgcgccatcccgtaactcatattacgcacttcatcttctgcgccatcaatttttggcgtgtaaagctcatctttaatcggttttaaatcatccatccaatcgacaactaaattggaatttgttacgacgatttcttttgctttttcttctccaaggaaggcgaattcttttaacatttcatctgtagagcggaaatgaacatctggtaattccgcacgattgagaggattagctcccccttgtgaatgaatcaagatcttacggtaaattttatcaactggatctttgtaatgcacattcccagtcgcaacgacaggttttccagttttttcaccaacgcggacaatgttttttaatatttcttctaacgctttttcatcacgaacaagttcacgttcaattaacggagcatatacgggtttaggttgaacctcaatgaagtcgtaaaattcggctaccttttcagcagcttgcattcctttttgcatcattgcttcaaataattcaccttgactacatgctgtcccgatgattaagccttctctcatttttttcaactgagagcgagggattcgtggtactcggtagaaatagttaatgttcgacatagtgattaatttaaataggtttttcaagcctacatctgtttgcgcataaatagttgcatggaaaggtctagcgcgtttgtatgcatcgccttctcccatatagtcatttaaggaatcatgaaattcaatatcgtgcatttcttttgcatctttaattagtttccaagctaaatatgcggttgcttcagcatcgaatacagcccggtgatgttgttcaaggataatattaaatttctttgttaacgtatttaaacgatgatttttaaagtgcggataaaggaaacgagctaactccaatgtgtcaacaactgcattctttgctttttcaagcccaactttttcataagcggtattaataaagcccatatcaaaagaagcattgtgggcaacaaggatgtcgtcgccgctccattccctgaattgttttaatacaacatcaatcggatcagatccttttaccatatcatccgtaatacctgttagattaatcgtagttgctgaaagtggatgccccggatcgataaacgcttcaaatttatcaataatttcgccgtttttcatttttacgcctgcaagctcgataattgtgtcataaacagcggataaacctgtagtctcaacgtcgaatacacagtaggttgcatcttctaaagcgatatgttgatcattatatgcgattggtactccgtcatcaataagatttgcttcgataccaaaaattacttttaagccatatttttgacctgctccgtatgcttctgggaaagattgcgcaacggaatggtcggtaatagcaattgctttatgaccccaatcagctgcttgcttaaacagtgaatcaactgatgaagtcgcgtccatttgactcatcggtgaatggagatgaagttctgcacgtttttcttcggcagtatcaagacgcttcactccagcaatttcgttgatgtcttgagccatcataattaaatcgcgcacaaaggtatcattttgaacactgcctcgtactttcacccacatgccttttttcaaattttggaacatggctgcgtcttcattatcacgcgaaaacatttttataatcatcgaactagtatagtcggtaattttgaattgcaaaagactacgaccactacgaagctcgcgaatttctgttgcaaagatgagcccttgaacagtaatacgacgttcttcatcatagacatcaccaaggcgtttgatttcttcatcatccttgattttatagccaatttgaaatggaccggtaagtggagctgcatttgcactgccgttttgtccttctgcttgacgtttttgcattacttggacagcttctgcggcttttttctggtcttcttcttgtttcgcctgtgcaaaagctttatattcatcggtttctgattgatctagcatatgcattttcattgctagtcgtggaaaaccggcttttccgtagttttcgataattttcgcttggaatcgttgttgaattgtcgcttcttccatatcattatgaaccgctacttcaataaaatgcggctctttgaacgtaggcttttgctccattaaaagtttcccgatcattggtgactgttttccaattggctcaacaatcaagttccaatactcttgaataagtgtttcgttaatcgtctgattttccggaactatttgcatttctgtttctgcaatttggctaaatgcacgcttcattccaacatccatcatatgaaaaagtgcagctgggaaaatttgtggtacgtgtaaatgaaattgccaagttttatttttcttatcggcgactaatttttcgattttagcatctttcgtgaattcttcgtaagtagttacatcttgtaaaccaatttgtgtcattaacagctgaaatcgttcttgtttttcttcctcttttgcagtcattccgaataacacccctttatccaaatttataaaagccagatgtccctcatgacccgttttcacatggaacgagtggagtttcatctggcacaattgtatcagtaattatttatctccaaaaagaattggtagcgtatttagtagctcatcttgacgaacttcaatcatttcgcctgtttttctaattttcacttcaacgataccttctgcggcttttttaccaaccgtaatacgaattggtagaccgattaagtcagcatccgcaaacttaacgccagcacgttcagtccggtcgtctattagtacgctaaatcctgctttttgtaacgagtcgtaaagtgattctgcaaatgcaacttgctcttcactcttcatattaacaggaattaaatgtaaatcaaatgggctaatttgcttatcccatacaagaccattttcatcattggattgttcagcaatagcagataaaattcgagacaaaccaataccatagcaacccataataattggttgtgcacgaccgttttcatctaaaatagtcgcattcattgcttcactatatttagtaccaagtttgaaaatatgaccaacttcaataccctctgcaaacttgataacgccctgaccatcaggagacaaatcgcctgcttgaatcatacgcaagtcaaaataacttgtaacttcaaaatcacgatttggattaacattaacataatgataaccatcttcatttgctccagctacagcattaacaataccttttactgcattatcagcaaagacacgaattttttcaggaacaccgattggccctagggaaccaaaattagcaccgagtaattcaaatgccacatttgggtctactaattcgacatttgttgcatctaaagcatttttaattttaatatcatttacttcatggtcaccacgaactaagaccataatcacttcttcatctacttgataaagcattgatttcattgttttctcaataggaacttctaaaaattcaacaatatcagcaatagttttttgattttctgttgctactttttcaagttctttctcaagttcatgcgattttttctccatatataaaacaggagccatctctgtgtttgctgcatagtcagaagcatcgctataagcaatggtatcttcgccaatatcagataatgccataaattctttggattcatttccgccaattgaaccagaatctgcaataacagaacggaattcaaggccgcaacgactaaagatattagaataagcttggtgcattagctcaaatgtttcatctaagctttcacttgtcgcatggaatgaatacgcatctttcataataaattcccgtccacgtaacagaccgaagcgcggacgtttttcatcacggaattttgtttggatttgatataacgtaattggtaaacgtttataagatttaatttcatcacgtaaaagggacgtaatcaattcttcatgggttggtccgagcacaaaatcacgagcggcacgatcttttaaacgcattagttctggaccataatcagcccaacgaccagattcatgccatagttccgcaggttgaagcgcaggcataagcatttctgcagcaccaattgcttctaattcttcgcggacaattgcttcaatttttcttaatgttaatgtcgcaagtggtaaataactgtaaatcccactcgctacttgtctaataaaaccagcgcgaagaagtaattggtgactctttacttccgcatcagctggaacttcttttaatgttggtataaatgtcatcgtttgacgcatttaaaacacccctttttccctttattagtctttctctttttagaaaaatgctcgttgtatatcgttccatgtcacaagtatcatcagaaccatcaaaagtgcaaatccagcaaaatggataataccttcttttttaggatcgattggtttcccgcgaacgagttcgtataagaagaacatcaagcgtccaccatcaagtgctggtaacggtaataagttaacaattcctaagttaatacttaaaacagcagtccagtttaacacggtcataaatccgtattgaactacttgttgcgtacttgtataaataccaactggcccatttagcatatccagtgaaaatccaccagtaaacatgttacccagaatcgtaaatatttgaacaatccagttccatgtttgcgtgaagccattggttattttagcagtaaatgaagtgtccatcggtgtttctactccaattttcccaacttctttaccattttctttttgcgtcgccggtttcacatcaatatcttgtgtttttccatcgcgatctattttgaaatcaagtgtttttcccgggttttcagaaacactttgaacaatatctgtccaagactttgtttctttaccattaatagaaagaacctcgtctcctttttctagaccggcttgtgcagctgccccatccggcattatgttaccaagtgtattatcggtactcgggaccccaccttgaacaaaagcaagtgcggtaaaaattaaaattgctaaaataaagttgaacagcgggcccgcaaaaatagtcatcgcccggtttcctaaagattttgcattaaaagaacggtcatatggcgtaatcatcgtttcgattttaccatcaataacaagtgcattacgttctacttggtaccggactttcttcgtgtcgtcatagtcttcatagccttcgataaatagttctttctctaaatcacatagagaaacttcaatcggttgggcgttgacatattgatccttaccgttaacgataattttgctaacagtttcttctggagttaattcaagccctactcggtaaccaggttttagctcaatttcttccccgtcttccccggccattcgaacatagccaccaattggtagtaaacgaatggtatactgcgtttcttttttccgataagcaaaaattttcggtccgaagccaatcgaaaaatctttgaccataatgccagctcgttttgcaaacaagaagtgacccagctcatggaaaaatacaatcagtccgaaaacgaaaataaaagcaataatagttgtcaaaatagcttcacctctataaaagtgtctttacatacgctcgtgtttcttgatcaacttgtaaaatagtatccaagttaggattagaaatactagtatgacggttcattgcattttcaacaagcgcttcaatattataaaaagcgacttgcccatttaaaaagccagcaacagcaatttcatttgccgcattcaaaactgtcggcattgttccacctattttaccagcattatacgcgagtttcaatgccggaaatctttcataattcacttcttcaaaatgaagcgctgaaaaatcagtaatccggaattctttttcgtatggaatagaaagtctatcgggataagttaacgcatattgaataggcatccgcatatccggtgtgcctagttgcgcaataaagcttccgtccacgaattgaaccatagaatgaacaatactttcacgctgaatgactacttcaatatcgtcataatccacaccaaacagccagtgcgcttccattacttctaagcctttattaaacatcgtagctgaatcaatggttaatttattacccatgttccaattaggatgttttaaagcttcttttactgtaacttcgctaagttgttcccgcgttttatctcggaaactaccaccactcgcagttagaatgattttctcaattctttcccgattttcaccgtttaatgcttgtaaaatagcagaatgttcactatcaacaggtagtagtgaaatgttcttttcttttgcagcttgcataactaaatgtcctgctgtaacaagtgtctctttgtttgctatagcgattgccttaccagcttcaatagcatctagagtcggtaataacccaacactccccataacagcatttaaaagaacgtccccatctaggtatgttgctacttctctaagtccatctaaaccattaaaaaacttcacatcaggaaattcagattccagtgtcacacggtctctcgtatgccaaacagctaccattttaggtttaaattcttgaataattgcccggccgcgctcaatattacgtccaaaactaaaagcaacaagttgaaatttttccggattttctcgaataattgtaagtgtttgcgttccaatagaaccagttgcgcccagtaaaataatttttttcattatcccatctccaattaaataatttgaagtatatgtagcagaggtaatacgaataacaaactatcaaatctgtctaaaataccgccgtgtccaggtaagattttcccagaatctttaacaccgtaaaatcgtttcaaggctgactctactaaatctcccagttgaccaaaaatagataaaaatactagaagcgccaaaacaagtgctatatttcctggtagttctgcaaaataataaaaacctcctgcaattacaagtgcgcaaacaatcccaccgataaaaccttctaccgtcttattaggactaacatttggtgctaatttatgcttgccaattgctttcccaataaaataagcccccgtatcggttgaccacacaataaataatgcaaaaaggacgtacattaatccagcttcccgagttagtgctaaataatggaacccaaatccagtataaaaagcagcaaccatacaaattccaacttgatcaaaatggaatttattgcgagaaaacaccgtattagcaagtaaaagtgccattaaaataaaaataacttccatttcagtaatatgcagtttatctaaaaagtccaaatatctatctggcacgacaactaaccacattaatagtaatgtaattattccattcatcgaaaaaattcgttgtttcgtcattacaagcacttcatataacgcaatagttgcaagtaaaatacttaataattcaaatggaattcccccgtaaaccacaaatggaataaaaaatataagcgcaacaactgcagtaataattctcgttttcaatcttttttcctccctagagccctccaaaacgacgcgaccgattttgatattcaataatcgcctgtaaaaaatcttcttttgagaaatcaggccaatgtgtttctgtaaaataaaattcactataagcgagttgccataacataaaattacttaatctcagttccccgctagtacgaattaataaatcaggatccccaagaccgtgactcattaaatgatcattcagtaattcttctgttaagtcctcagatgttttgccctctgaaacaagttctttcatcgcttcttttgctgctgtgattatttctgaacgtccaccgtagttaagcgcaaaatttagcgtaagacctgtacaatgagctgtatccgcaattgctttttccactgcacgcattgtgtgttcaggcaaattttctcgataccccatcacattaacacgaacattttcttctatcaactctggtacaaaagagtcaaaaaattctacaggtagtttcattaaaaaatccacttcatctgtaggtcgtttccagttttcagttgaaaaagcatagagtgtaagaacatcaatgcctatcgcgtttgcatatcgtgtaactcgtttaacaacatccataccttctttatgccctgcaattctcggtaagaaacgtttttttgcccatctcccatttccgtccattataattgcgacgtgacgtggaattggcaaatcttctgcaagttcactatttaatatatttccatcttgtcgaaatagctttttaaacatcataaatcctccaattgatacacttcttagagcatgtctatacctataataacaaaaaagaatcaattaatgtactaaaaattccatgtgaacagatgagattttcatgagagcgatggaattgcccattaaaaaacattcctaacccaacacatatggaaagaattaggaatgtcacttcaacttaaaaggtgtttaaccctatttgttactatttgaaaagtatcaattaaacttctaagatttccgcttctttgtctttcgtgatgctatcgatgttcttgatgctttcatctgttaatttttgaacgtcttcaccgtaagaacgtaaatcatcttcagtgatgtcgccatttttttctagttttttcaagtcttcatttgcttcacgacgaatgttacgaacagcaactttcgcttcttctgcttcttttttcacttctttaactaactctttacgacgttcttctgttaattgtggaatagataaacgtagtacagagccgtcattattaggtgttaaacctaaatctgattttaaaattgctttttcgatttcacctaaaatagttttatcataaggtgtaataagcaacattctagcttctggaacgctgatagatgccatttggtttaccggtgtagctgctccgtaataatcaacagttaaacgatcaagtaatgacgcgttagctcgaccagcacgaatagtacctaattgtctagttaaagcttgttctgctttttccattttttctttggatttagataatacttctttactcattattttttccccctgacagtagtcccgattttttcacctaaaataactcgcttgatattattaccttgttcagtaaatgagaagacgattaatggaatatcattgtccatacttagtgatgatgctgttgtatccattacttctaaaccttctttaataacatcaagataagaaagttcttcatattttttcgcattttcatctaattttggatcggcattgtagacaccatctacattgtttttcgccattaaaattacatctgcttcgatttcagctgctctaagtgctgctgcagtatcagtagagaagtacgggttacccgttccacctgcaaaaataactacgcgacctttttcaagatgacgaattgctttacgacgaatgtacggttcagcaatttgacgcatatcaattgatgtttgtacacgtgttgcaactccaatattttcaagagaatcttgtaaagacaaggaattcataatagtcgcaagcatacccatttggtctgctgctgcacggtccattcccatttcactaccaagtttaccgcgccagatatttccgccgccaactacgatagctacctctactcctaattctactacttctttgatttgagcagaaattaaattgaccacgctcgggttaattccaaagccatcatttcccgcaagtgcttcaccgcttaattttaatacaactcgtttataatctggggtatccataatagcctccaatttcatattctattcatagacagaaaacttttccatccaccattatctattctactaaaaagctagctattacaaaagtgttttctatcaaaaagtgaaaaaacattttaaaattcacaaaatctccaaattttattagctaaattacttactttgtcatttgttagacacccaaaacagtattttttcacaattaaaatggttttgtaaagtatcatagctgtatttatgttaaaataaacacataaatagctaaaaaatgaacgaaaatgacaaaacacacgggagttttagatttaatggtaaaatggaacaaaatttatacatatagcgaaagaattgaagaatgggaaaaacaaacaattatagaaataccctcttatagtgaatatgcgggttattttttcttattgccgcgaaaaatggtattttctgtttctccggattatagttatttttattttccagatacatggatttttacattaaaaaagcataccgaaaaaaagagtatagatgcagcaacaatgatgctcctttttaagcaggaaaacgaagaaataatgcaacattttcaaacaaaaaaaataaacgatagtatcgtcaaagttcgtacacatatacctaaaaaaattgaaaaagatgtgataattgcaaatgaccttattagacaaccaaatacaagcaatacagaaacttaaacaatataatgttggcgctttatttatgaaacccggtgcaggcaaaacacgtgtagcttgcgaattaattaaggaagtaagtcctgattatgtcttgtggatcacgccattccagacgaaagaaaatctcgctaatgagattaagaaatggggctacgaatttccacaagatattattggcattgaatccctttccaactcagatcacttatatctaaaatgccgggacaaactaaagaaatcgtctaacagctatattattatggatgaaagtttaaaaataaaaaataaacacgcgctccgaacgcaacgagccattaaactttctcgattagcaaactatcgactaatcatgaatggaactccattaagcagaaatattttagacttatggtcgcaactagaatttctctctcctaaaatattgaacttaagtttttcccagttcaaaaaaacattttgcgaatatgtaaccattacccaagtatcgaaaaacaaacaacagtcaatggacattattaagaaatatcataatttagagtatttataccaattaatcgctccttttacattctcttcttcgcttgaattaaaagtcaattggcattatattcgtcacgatttcactatagacgacgaacttttgcaaaaatattatgaaataaaagatgattaccttcaaaaagcagctgcttacacaattaatattaattttctagagatgtcccaagtgatgcaacattgttattgcctctcttcagaaaaattcactattgtcgaatctttaattgcaggaaaagaagctacaaccatcattttttgtaaatataagcgatcagaagaagcattaattaaagcgtttcctaatgtaaaaattaccacttttgctaaatcgtcttacgggcttaatttgcaatattataatcaaattatttattttgataaaacatttgattattctcagcgcgatcaatcagaacgtcggatttaccgcaccggccaaacacaagactgttactatcatgatttaagcggaaatgttggtctagataacctaattgattcaaacatttctaaaaaaacgagtttattgcatgaatttaaaaaagaactctcacaaaaaaattcttttgaggtgattatggatgctttctaaaacagtctttgatgcttcccaagaaagaatggaagttattttttccgaattcgataacatcattgtgtcattttctggcggtaaagatagtgctgtgatgcttcatttaatgattgattatataagaaaaaataatattcaaaagaaaatttatgtatatcatttggactatgaaggtcaatattctgcgacgagtgattttgtagctgaaatgttaactagtaacttagatattatcgagccgctttggtgttgccttcctattgcagcccaatccgcagtttcgatgtataccgaccactggataccttgggaaaaatcaaaacaagatatttgggtaagagaaatgcctgattatccatctgtgataaatgaagacaacgccccttttgattttgatttccatacaatttgggactacgaattcaacaagaaacttatccactggttacatactaaaaataaagctgaaaaaaccattgccttaatcggtattcgacaacaagaatcgctcaaccgctataatgcgatccataaaaaagaacgcatgtataaaaactataattggactactgaaatttccaaaaacatatataacgcctacccgattcatgattggttagtagaagatatatggactgcaaatgctaaattcgattggccttacaataaaatttacgatttgttttaccaagccggtttaactttgaatgatatgcgtgtcgctagccctttcaatgattccgcaaccgaaagtcttaagttatatcgcgtaattgaacctgccctttggtctaaattagttggtcgcgtgaacggagccaatttcacggctatttatggtggaacttcagcgatggcatggaaagaaattaacttacctccaaaccacacatggaaatcttatttggaatttttacttacaacattaccgagttatacaagagaacgttatttaaaaaaatttaaaacaagcattaattattggaccgaaaaaggcggcgctttaaaagtagaaaccgtagaggaattaaaaaacttaaatgtacaagctgacttccttggaaaacctcaaaataaacgtacatattccaatcccatggaaattgttcgctttaaagaatatccagatgacttgaaaatcaaagaattcgccagcgttccaacatataaaagaatgtgtatcgctattttaaaaaatgattatacctgtaagtatatgggttttggtcaaaccaagcttgaattagagaaaagaaaacatgcactagagaaatataataatattttatgaggtgatataatgaattataaaagcccagtatacaacgtcactcccattcactacaccaaacttcaagcaaataattataatccaaataccgttccagccacggaactaaaactactagaaaaatctatttgggaagatggatttacacaaccaatcgtttgctatcccttggaaaactctgataaatatgaaataatagacgggtttcatcgatatactatcatgcagacttctaaacggatccgcgaaagagaaaaagaattattaccagtagttattttagaaaaagataccgtaaaccggatagcttctactattcgtcataatcgtgctcgcggttttcataacgtagagcttatgtcttctattgttggtgaattagcagatagcggcatgtcagacagctggattatgaaaaatattggaatggatgcaaatgaaatcttacgcttaaaacaagtgagcggccttactcacctcttcttagataaagaattcagtaaagcttctgattaattgaagaaaagaggaattaaaattgaaagaaaataaatacgatgacaaagaattttttgaacaatatagtcaaatgcctcgttctaaaaacggacttgcagcagctggagagtggcatgaatttaaaaaacttctcccagactttaatggaaagacagtacttgatttaggctgcggattcggttggcactgtatttatgcagccgaccatggtgcgaagaaagtagttggaatagatttatctgagcgcatgttaactgaagcaaaacaaaagaccacttcaaatgcagttaattataaacaaaaagcgatagaagatatggataatgagccagagatgtatgatgttattatgagttcactcgctattcattatgtcgcttcctttcaagacatttgtaaaaaagtccatactaatttaaaaaccggtggcgagtttattttctctgtcgaacatccagtttttaccgcggatggcagacaagattggtatactgacgaaactggtaataagttacactggccagttgatcgctattttaacgaatcgattcgaacaacccatttccttggcgaagatgtaaaaaaataccatcgcacccttacaacttacatccagacactccttcaaaataattttgagcttaaaagtgttattgaaccagaaccagctccagaacttaaaaatttaccagaaatgcaagatgaatatcgtcgtccaatgatgttaattatttcggcaactaaaaagtaatcaaaaaacccttctaagttataatagaagggttttactttgttaaaagattatttctttgctttttttggtttttctttttcttgctgtttgttcatcgcgctcatcatttgattgattttcttttgtgatggtttttgacccatttgcgccatcatcatttgtaacatttgttcgttaattggcggattgttttttaaatagctcatcatataacgtcttgcaataaagaatcctcccgcaagaccagctagtaaacaaataatgccgacaagaatgtaaatccacatagtctcttttctcctccttgaaacaaaatcctcttttattgtacttgatttatattaaacagacaatacttttcaagaaaacttatcatctagatcaatttatcaataaaagctgcaaacaacctcgtaattataccattaaaggcacccctgcgcaatctataaaagcataaaaaaaagaccgccctagataaatatactagacgcggtctgtttgtttaattaaagtgattttactgtattaacaacgttttctacagtaaagccataatttttaataactgtttcacctggagcagaagcaccaaatttgtcaattccaatcactttaccatctaaaccaacataacgttcccaaccaaagctagcacccatctctactgctacacgttttctaacagcatttggtaagacgctttctttgtattctgctgattgttttgcaaatagatcaaatgatggcacgctcacaacggatacatctgttccttgagcttgaagttctttttgcgcttcaacagctaaattaacttcagaaccacttgcaagaataattgcttctggaacctcacctttagcaggagaaataacataagcaccttttttaacgccttctgcagataatttcgcagaatttggtaaagttggtaatccttgacgagtaagaacaagcacatgtggagtatctgtcgaagtaatcgctagtttccaagcttctactacttcatttccatcagcaggacggataacagaaagtcctggcatagcacgtaagcttgcaagttgctcgattggctcatgggttggaccatcttcccctacagcaatactatcatgtgtcattacatatgttacaggtaaatgttggattgcggataaacgaatcgcagcacgtacatagtcagagaatacaaagaatgtacctccgtatacttgtaacccgccgtgtagtgccataccgtttaacgctgcacccattgcaaattcacgaacaccaaaccagatatttctttctgctggtgtttttttagtgaattcaccatctgttttaattgttgtattgttagaaccagcaaggtctgctgaaccaccaaaaatagtaggtattttcgcagctaatgcattgataacttcaccacttgaagcacggctagcaagtgctttagaatcgtcatatactggaagatctgcatcccaatcagctggtaacttgttatttaagctatcttctaattgtttagcaagctctgggtatttcgctttataagaagcaaataattcgttccatgctgcttctgctttttcaccgcgttctccaatagtttctttaaagcgagttgtaacttcttcaggaacaaagaatttttcttcgtagttccaaccataagcttttttcgcttctaaaataccttcgtcacctagaggagcaccatgaactttactagtacctgcattaggagcaccaaaaccaataactgttttaacttcaatcattgtaggttgtgatgtattttgttttgctttttcaatagcagctaggatttctgctgtatcattgccatctttaactaataaatgttcccaaccataagcttcaaagcgttgttttacattttcagagaaagatttgtctaaatcgccatcaagagaaatatcattggaatcgtataaaacaacaagtcttccaagttgttggtgacctgcgtaagaagccgcttcagaagcaacaccttccattaagtctccatctccacatagcgcataagtatagtgatccacaactgggaaaccatctttgttatattttgcttcaagatgtctttctgccatagccataccaacagccatcgcaataccttgaccaagtggaccagtagttgcatctactccatcagtataacgatattctgggtgacctggagttttactttcccattgacggaagtttttaaggtcttctatttctaatttgaaaccacttaaatgtaataaactatataaaagcattgagccgtgtccagcagaaagtacaaaacgatcacggttaaaccaatgtgaatttttagggtttgtatttaatacgcgagaccaaagtgcataagccattggagccgctcccattggtaatcccggatgaccagaatttgctttttgaattgcatcaattgataatgtacgaattgtatttactgctaaactatctgtgttatcgaacaaatgaaacatcctctcttcaatataattttaactacttttaataataagcctaaaaagcaattaggagaactaataattgctttaaattgcttaattgattggtatttttgttcatttgcgcaaaaatgttcatttggtactaatttttacttcttattttttctcatttgttttattttatgcggtgttacatcatttcctttagggtcaataatcgtagtattttcgattgttcccttcatatgagtgcgaaacgacttaatatattcttttcttaatttttcttgttctactttttcatcagcagttagagtccctgcttttttctttttagaaagttcattgattctatctattttagctttttctagcatcacacttcatccttttcttcattatattaaaataagaaagtagctaaatcgctactttctttattatatcataaacgatactaaaatcgtttctactggtttgctaattgaatagtgctatcacttctttgtaactttgtttcgtgtactggtataactacataatccccagctttcacatgtccatctgtaaggttattttctttttcaacccaagatacaaaatctgcttttgccatatcgctcttcgctgcatattggtctgcaagtgcccaaatagaatccccttcatttacatctacctcagaatactcactgccactcccaataacagtgcacatcaatataattcctagaactaaacaagttattacaaatataatagaaacataaaatttatcccaaattaattttaaagtcattaataatccctccaaaaaagaatgtacgttcgcttttctatattatagaacagccgttcgcatatgtcaataaaaaaacgaacctttgtttgcatattggattttcttttgctatacttgatttataaaataaccattaaatcaatgaggtgaaaccatgaaaatatctaaacgtcaacaagatatatatgaatttataaaatcagaagtaaaagaaaagggttatccaccttccgtacgtgaaatcggtgaagctgttggtttagcatctagctccacagtccatggccatcttgctcgacttgaaggtaaaggactaattagacgtgaccctacgaaacctcgtgctattgaaattttgtctttagaagatgaagcagagacgccgaatgtagtcaatatcccaatcatcggtaaagttactgccggaatgcctattacagcgattgagaatatagaagagtatttcccactccctgaatatatggctgcaggagaaaccaatgtcttcatgcttgaaatcgacggagaaagtatgataaatgccgggattttagatggagataaagtaattgttcgacaacaaagttcagcaattaatggtgcccctgtcgtagcgatgaccgacgaaaacgaggcgacttgtaaacgtttctataaagaagcgaatcattttagattacaaccagaaaatgatgcactagaaccaattatcttaaataacgttactattttaggcaaagttattggcctttatagagatattcactaaaagctatattttgttaggcggtttttatattgatttattttgaaacagatagactaattgcaagagattatgtagcaagtgattatgttccctttagcgaaatgaacggtgacaaagtcgtaatgaagtactttccatctacactttcaaaagaagaaagtaatgcttttttagaaagaaatcaacaagaattaacggcacttggctacggactttttgccattgaagaaaaatctaccggcgaatttattggttttaccggttttcatgaagcaacttttgaagctgcgttcaccccttgtatcgaaattggctggcgcttaaagaaaagtgtatggaaccaaggttatgcaaccgaagccgcactaggagctctcgatttcgccaaacagaaaacaactattgatgaaatttacagtttcaccgctgtgttaaataagccatcagaacaagtaatgaaaaaaatccattttacaaaagtagctacatttatgcatcctgctttagcggacggacatcctttaaagccacatattctttataaagcataggaaaaaccctgtacaattttgtacagggttttcttagctccaaataaggagtgaaatataaagtccgacgagtgtaataaacaatactggaatagtaatcacaatacctattttaaaataagatccccagcttatttttatacccttttgagctaatacatgtaaccatagtaacgttgcaagcgaaccgattggcgttattttaggccctaaatcagatccgataacatttgcatagattaacgcttctttcatcactcctgtaaatggagtatgatcgattgcaagtgcattaatcataacagttggtaagttattcattacagacgacaatatcgcggcaataaagcccatcccaatcgtacctacgaaaagcccataatgcgcaatatatgaaatagcctctgctaataatttagtaatgccagcgttttgcaaaccgtatacgacgacatacatcccaaccgagaaaaacacaatattccacggcgccccttttaaaattttccttgtagaaacagcatgactctttccaccaactagcaaaaagataaacgctacaagtaaagcgataaatgacactggaatgtccaaaaagctacttaagaaatatccaatcacaagaatgataagtattccccatgaaatccgaaacatttttttatctttaagcgcagaagccggctcacgaattccactaatttcataagttctaggtaacgcttttctaaaataaatataaagaacaataatactcgcaaccaacgaaaaaagcgtcggaatcaacatcattaatgcgtactttgaaaaactaatgccaaaaaagtcagccgaaacaatattcactaaattacttacaacaagtggtaaagacgtcgtatcagcaataaatccactggcaatgataaagggaaacacctttttctcatcaaaattaagcgcacgcaccatcgccaaaacaattggagttaaaatcaaagctgccccatcattcgcaaaaagagctgccactagtgctcccaaaatagaaataagtacaaacatgagtaatccgttccctcttgctaaccttgccatatgtaacgctgcccattcgaaaaaaccaatctcatctaaaataagtgaaataataataattgcaataaaagcgagtgttgcattccaaacgatgcctgttacagttacaacatctgttaaagtgacaacgccaagtaataatgcgagtaatgctccaatacaagcggaccatccaatcgacaagtttctaggttgccaaataacaaatataagcgttaaggcaaaaactaaaacagctaaagtaatctgcatacctgcccctttccctagcaaatattaatcccttttgctagcacatttataaatatatgcctcaatcaccaaaacatcaaacatttgattttcaattgcataaaaaaagctcgctcccaagtcggaaacgagctttttaatattaataaatttcaagatattgttcacgttcccacggatgaaccgctgtacggaacatatcacattcaattgttttcgcttcaatgaaatgttcgaaaatatgttcacctaagccatcacggatgatgtcatctttttcaagctcgattaaagcatgacctaagctttctggtaaatcataaattcctgttgcttcacgttcctcttcgttcatgccgtaaatgttacggtcaactggagctggaggagttagctcatctttaatgccggacaaaccagcttttagaagtacagccattgctaaatatggattagcggatggatccacactacgtaattcaagacgagtacttaatccgcgagaactaggaacacgtactagtgggctacggtttttacctgaccatgcaatgtaacatggtgcttcgtatccaggaactaaacgcttgaacgaattaattgtcgggttagtaacagctgtaaatccacgagcgtgttttaacatacccgctaagaaatgataagctgttttgcttaattcaagttcgccttctttatcaaagaacgcattaccttcttctgtaaatagggacatattgaaatgcattcctgaaccatttacaccaaatagtggtttcggcataaatgtagcatgtaaaccgtgtttgcgagcaattgttttaactactaacttaaatgtttggatgctatcacacgcagtaatcgcatcttcatatttaaagtcaatttcatgttgacctggagctacttcatggtgagaagcttcaatttcaaagcccatttcttctaattcaagtacaatgtcacgacgacagttttcgcctaaatcagttggtgctaaatcgaagtaaccaccgctatcatttaattcaagtgttgggcgacgattttcatctagtttgaataggaagaattctggttctggtcctaagttgaattcagtgaaacctagctcttccatttctttaagtacacgttttaagttggcacgtggatctcctgcaaatggtgtcatatcaggattataaatgtcgcaaatcattcttgctactttccctttttcagctgtccaagggaatactacccatgtgtctaagtccgggaataaatacatgtcggactcttcaattcttacaaaaccttctatggaggaaccatcaaacataatcttgttatctagtgctttctttagttggctaacaggaatttccacattctttattatcccgagaatatccgtgaactgtaaacgaataaattttacattttgttcatctgcaaagcggaaaatgtcttcttttgtatattttgccataatctaaattcctcctaaataatctttttatattaacttctaaataaagtaaatacctcttctaatctttttaaaaccttggtaattgttgttttcctgtggcatcttgttttacaaagcggccggcttgttgcatttcttttctaagtattttgcgtacatcatcatctgtcaaaggttcttttgattctttttgctgcatttgatacattttcttaattcccgcaatattcagaccatcattcaaataatcttttatctctagcaaaacatcaatgtcttgaagtgagtacaaacggtgatttccttgattgcgtgctggatggattaatccttggtcttcatagtagcgaatttgtctagcggtgagatcggttagcttcatcacaggcccaattggaaatagcggcatcgatctccggatttccttttcactcacgacaattccccctcaaaacatgattattttttgatgatagtagcattataatgtacgtcagatgttttgtcaaatttatgtaagattatctaacattgctcacaaacccatatatatcaacattttcacaacaaaaaaaccacgatagaaactaccgtggtaaaaaaataaaaactttttttgaaaatggatgttacttttttataaagaattttctattgctctagtgacagcaattttaacgtgttcgtatgttaaacctccttggacgtatagttgataaggttctctaatcggtccgtccgctgtaagttcaaggctagctccttgaataaatgtacctgctgccattatcacgtcatcttcgtagcccggcatatatgcgccgattggcaaaacatgtgcattaactggggaggcagcttggattgcttgagcaaaagcaatcattttatctttgctgtggaaagatacactctggattaagtcagttcttttggcatcccaaagcggatctgcttctacgccgaattcagctaacatagcagcagtaaaacgagctcccttaattgcttgagcagttacatgtggtgctaagaagaatccttgatacatttctaataagctataaagcgatgcgcccgcttctcttcctatcccaggagtcgtcaaccggtagccgcataaatcgactaaggtatttcttccagcaatataaccaccagtttttgccaaacctccacccgggttttttatgagcgatcctgcaataatatctgcgcctacttcggtcggttctattcgttccacaaattccccgtaacaattatctacaaaaacaatgatattggggttgatgttctttacaaaagtaaccatttcttttattttctctattgtaaaagaaggtcgatctgcatagcctctagaacgctgaataccaatcatttttgtattagcggatatttttttagatactgctggataatctatttcgccatttggtagtaacggtactgcatcgtagccaatttgaaagtctttaagcgaaccttgaccttcgcttctaatacccacgatttcttctaacgtatcatatggctcaccagttatatataataactcatcccctgggcgcaagattccgaatagaacggtagaaattgcatgcgtaccagaaataatttgcggtctaacgagagccgcttctgttttaaatacgcttgcatacacgcgttctaacgtatctctcccttcgtcatcataaccgtaaccagtcgatggattaaaatgaaaatcacttactttattttcctggaaagcatcaagcacttttgcttggttaaattcggcaatttcatcagtttcgttttgtaatgaagtaatttgttgttcgactttttttcttattgtttgaatttcagtcattagtagtttcctttctaggtcgataaccctcgattcggtaacatgctttttcttccatatattcaagctttgttatccatgcttgttgtttcatttgcgctaactctttacctttttcttctgataaatctactgtaaagaaagtccagtttttctcaattagttcaatcattcgttgttttatttctttaggagcatcttgatctaatgctgaaataagtaagtgctctgggcgatcaggtacgaatgtagacggcgctttgtccattttattatagacaattaatgttggaaggtgactcatctcaagctcttctagcaagtttattacagtcgtttcatgctgtaagtaatctgggtcagaggcatccactacatgaattaaaacatcaacatttgcggtttcctccaacgtagaacgaaatgctgcgatcaaagttgttggcaagtcttgaataaaacctactgtatctgttaaaagtgcttggaacccgccttcaaatcgaatttttcttgttgttggatcgagtgttgcaaataatttatcctcttcaagtgtcgtctcatttgttagacggttgaaaatggttgattttcccgcattcgtataaccgattaaaccgaaacgaaatacggattgggtgtttcttctatcaataatacgcttgcgatgtcgctcgacgtgtgtcagttgcgcttttatatcatgcattttttcgcggatatgacgtttatccatttctagtttcgactcacctggacctcttgaaccaattccgccccctaatttcgaaagcgaggcaccttgtccactaagtctaggtagtaaatatttgtactgagcataggcgacttgtagtttaccttctttagacttagctcgcatcgcaaaaatatctaaaatcaattgtgtgcggtcaataattcgggcatccactattttagaaatattgcgcacttgtgtagcactaagttcactattaaaaataacgacatccgcttcatgcatttccactaactctgaaagttccatcagcttacctgaacctatgaaggacgtctgactcacgcgttctaatttttgaatcaactcatccataacttccccattcgccgttttagcaaggctatggagttcgctcatggagttccaaaaagcttcttctgttttatttggcaatatgacgcctacaagtattattttctcccgttccacaagtacatctccctttttcagacaaaactaatcgtagcatatttttggtataaaaaaaagacatgaaacatcgccaaaacgagtttcttgtcttttaaaggaattgcttattccgcatcaggattcaaagcgacattcttttgcggggagaaagttgaaattgcgtgtttaaatacaagttgttgttttccttcgacatctagtagtacggtaaaattgtcaaaacttacaacgcgtcctcttaactgaaagccatttgttaaaaatactgttgcaagaattttttccttacgcaattgatttaagtaatagtcctgtaacccttgtccaccttgtttcataatttccctctccaatctctatcttatactaaaaaattcccaaaccccaatgtagtttcattgtgcaattggttggctaatttcaaataccctttatttcttactaccaaacagaaaagtgttatttagatgctaaaaaggtcttcactttttccattgcttcagtgtcagttgtgctaacacccgcttgaatccagtcaatatccattctatttctaaaccacgttaactgtcttttcgcgaaatgacgcgagtttttttgaattaattcttttgcttcttcaagcgaactatttccatcaaaataagtaaataattctttataaccgatgcctcgtatggctggaacatcgactaaatgttcatcatatagcttcgatgcttctgaaactagtccttcttcaaacattagctctacgcgcctattgattcgttcataaagtaactccctgtctaaatcaagtcctagaaaaagaggttgatatgcttcgtttaacgtatgatgaacttgatattcagaaaaaggttttccagtcaaatgtatcacttctagagcccttatgacacgccttttattattttcatgaataagttctgcgctttttggatcaagttgatctaacatttgccataaagtcgttttgtccaattgatctagttctcttcggtaagccttatcttcacttgcatttccaaaaccataatcataaaaaacagactgaatatatagtcctgttccaccaactattattggaagttttcctctattatgtatggattcaattaagccccttgtttctgcttggaattttgctgctgtaaaaggaacagctgggtcagttacatcaattagataatgttttatcccatccatttcttctggtgtgatttttgcggtaccaatatctaatccacgatatacttgcatagagtcgccgctaatgatttctccatcaaaattcttcgctaaggtaatactaagacttgttttaccgacagcagttgggccaacgatgacgataacaggaatcttactcaaaaaaaaacctccttttcgcctgtaatcaatgtaccatgaaaatggtttcttgaaaatagcgaaaatgatttttttcataaaaaaagcgcaaatctggaagaaatgcgctctttttatgattcttttatctatcatgccaatctgctggttctctggcatcattaatttggatatttaattcttctatataagtttgttttacatcgtcgctccagtggaattgtttggccatttcatctacaaccgcatctttccattcaagtaaatatggcatatcaaacagcaagtaacctgtacggcgtaataagaaatcaatcggtgttgttacggcttcatgttgaatcgaatagcgaagttctgcataaagactatttggtagagtagtttcattttggtctttgtgttcttgcgcgtaggtaaacaattgatcaatattactaccaaatcgtttagcaatttcgcgaccttcttctagtgtccaaccgaaacgattatttccttctttcgcttttttcgaaaggaatgcttctaattgttctgaaccgccaatgtctccacctgagataggtaaatgttttgtttgaactggtttatattttttaccagtttctttggacaatgttttggatacaccgtctagtaatttttcagccattttgcggtagcctgttaatttaccaccagccattgtgattaagccactttcagagaaccaaacttcatcttttcgagaaatttcagaaggatcttttccttcttcgtaaataagcggacgcacgccagcccagcttgattcaatgtctttttcgctaatatgcacatctgggaacatatagttgatcgctttaataacataattatggtcagattcgagtgcttttggattaattactgcttcatcataaactgtatccgttgtaccaacatacacttttttatcacgagggatagcaaaaaccattcgaccatctggtgtatcgaaataaaccgcttgttccattgggaatttttgtttatcgataactaaatgaataccttttgttaagcgaagatgtttattatttgtagcatagtcgagttttctgactttatctacccatggtccagctgcattaattacgcgatgtcctttaatatcgtaagctttgccagttagacggtctgttacagtcacgccaaccacttgttttttatcatcatataagaagtgttctgcttttgtataattaattgcgtttgcgccaagttcaacggcttttttcattacttcaatcgttaatctggcatcatcggtccggtattctacatagtaaccagagccttttaagccatcttttttaacaaatgggttttttgctaaggtttctttggcgcttaagatcttgcggcgttcatttttctttacgcctgctaaatagtcatataaacgaataccaaaggaagctgttgttttacccatatttccgcctttatggaatggcaacatcatccattctggagtcgtaacgtgtggaccattttcataaacgatagcgcgttctttcccaaggtctgctacttctttaatttcaaattgttgtaggtaacgtaagccaccgtggactaatttcgtggagcgacttgaagttccgcttgcgaagtcacccatttctactagcgccacactcatacctctggaagttgcatctaatgcgattcctgctccagtaataccgccgccaacaatgactaaatcgaatttttcttcttgtaaatttctttcaatggtttctctatcaaaagctgagaataattgtaccattttgtttgcccccttcaaattgtttacgtctgatttatgccttcttgctacttttccactattccaatgaactgaaacgctttaagttataaaaaaacaaaaaaagagactgcaaatgaaggcgattgcgctcgccttttgcagtctctccgaatctcagacaatttaattattaacttacttcgattatagcttgtaatcttttagaatgaaagcgttttgctcagcgacttgttttactatctttaattgctacagctctttctggaaaatcagtcataattccttttgcatgaatatctataaaatgagttatgtccgcttctttattcactgtccaaaaacgcgctggaatttgttggagaattgggttgttttccgcttttattggcggatgaaccgcgtctaactgaattttttcatgtaggggaagcaccttgtctaaattgccatgtgtgataagcgctaaccttgctccactatctagttctctaaggcgaatcagggtatcaggattaaaagaagaatacatccgctcaacattcggaaactgactcgctaattctaaaacttttctctcaattccttcatattcaaagacgtctgtttttaattcaatattgaggcttactcccgtgtgattcactaatttaaatacttcttctaaagtaggcacgcgaacttttctaaaaaagtgtttggcggtatataattttttcacctcaagcaatgtaaaatcttttaaaaatccagtcccattagtagttctatccacacgttcgtcatgcattacgattaattctccagattttagtacatgtatgtctaattctattccatcagcacctgtttctatagcttttttcatagccggcaatgtgttttcaggatgtgtgccactacttcctctatgagcataaatctctgtcaaatcgcttccccccaaactatttacttataattactataacaaaaataagtaaatatactcaaatttttaaaatccatgtataatttcagctttttaaattacttcttgatttatctatggtattatagtatggagctaaaaacagatggctttactatctctgtctaagtttacacacatatatttatcacaaataggagatgttaatttgaaaaggactactcgctacagtagaaaatatgttccgagtattgatggacttcgagcactcgctgttatcgctgtaattgcctaccatctgaacttcagttgggctaaaggtggattcatcggcgtcgacatatttttcgtcttatctggttatttaattacgaatattttgttaacacaatgggaaaaaaatcaatcactgcagttaaagcaattttggctcagacgttttcgacgactgattccagctgtctatgtgatgattgtagtagttgtgatttattccgtgtttttccatcctgaaattttaaaaaacttacgtggtgacgctattgcttcattcttttatgtaagtaattggtggtttattttccataatgtatcttatttcgattcatttggacttccatcaccgttaaaaaacttatggtctcttgcaatagaagaacaattttatatggtttggcctttgtttttacttgtattcctcaagtgggttaaaaatcctaaattacttttaaaaatcgttgtaggattaggtcttctttctgcgattttaatgactgtgttatatgtcccgggaactgatccgagtcgagtttattatggaacagatacaagagcatttgatttactagctggttgtgcactcgcttttgtttggcctttcaaccgacttagcccagttgtaccgaagaaaagtaaagctgctcttaatattgctggaacaattagtattcttttcttcctgttatttacagcgtttgttagtgaataccaaccatttttataccgcggtggtttgctgttagttgctattcttggcgttatcatgattgcaactatctcccacccagcctcttatttaagcagaatttttagttttaaaccgcttagatggattgggacacgttcctatggtatttatttatggcactatccaattattactttgactacacctgttttagaaatcacgcagcccaatatttggcgcgctatcttgcaagttgccgcaacatttattatcgctgaattatcgtttcgtttcattgaaacacctattcgcaaaaacggcttcattaattatttcaaaggattcaaagataaaaattattttgtcttgaaaaataaaccggttggcaaatggcttagtattgctggccttgtagctgttttagcagtgtttgcgcttgggatgacaaatgttctttctgtaaatactaatgctgaaaaacaacaaacatccgttaaaaccacaacatccacaaaagatactgagaaagaaaccaaaaaagaagcagaagagaaagagaaagaaaaagaaaaaacatcaacggatacagagaaaaagaaagaacccgaaacaaataaagctgcgggacaaaatgatccgacccaaccagataataaagataaagctgcaaccccaacccctacgattactcaaacagtagctattggtgattcggtaatgcttgacatcgagccatacttaaaagaagcagttcctaatgtgacaattgatggtctagttggtcgacaattgcgcgatgctataaatactgcaactggttataagaagtttaatagcgaaaacagctcagtaatattagaactcggcacaaacggtccttttactgaagatcaactgaatacactattagaccaattcgataaagcaacaatttatctagtcaacacacgagtccctagaggatggcaaaatgaagtaaacaagagcattgctaacgcagcctcacgtccaaacgtgactgtcgttgattggtattcaaggtcaagtggtcagtcgcaatacttcgctcctgatggtgttcatttaactaaatcaggtgctcaagcctatgtcgcgatgttaacaagtgtaatgaaaaaatagtaagctgccctaatacgggcagcttttttgtttactatatttaaaccttgtatattgatagccaaaaaaactacccgccactattttgagcgagtagttttttgttattattttttacgagcaattagaacgcctaatcctaaaactaagaatcctactgctactccagttacaggtaaagaatcacctgtttttggtaaacttgctttgctggctgttactaatgttgagttaccagagttagcttttttactagctttcggagtagaagaacttgaatcttctgatgttgaattagctggatcagttgagtccattgaacccgttgagtcaatggatgttccaggatcttctgctggcgctggatcgtttgatggatcagggtcagatgcagggtctggtgttggtgttggatctggtgacggtgttggatccggtgtcggcgttggatctggtgctggcgccggtgttggatctacaactttaacagtaactttaaatggtgttgctttttgtttcgctgttcccgcatttagtgtaactgtatattcaccagctgttgttaaatcaacaactgtatcaaagtctgtcgtaatcgcagcactattgttcgttacagcattaatatccgctaaaaattcagcttctgtttttgcgtcattcatattgtaactaacttctgtttctgcagtaatcactgtttgttcaacgatagtaacggttacttgcactggatcagccgttaaaccaactgaatttgatgcatttaaagtaactgtataagttcccggtgtggagaaatctactttatctgcaaagtcgcttgtaattgttccaccattggcacttgcattaatatcttttaagaattgttctggtgttacggtttgtccttgcgtataagatacattatcatctgcttcaatacttacagaatgatcgacgtcatataatccaccagaaagatttccagttatattatatgttccattagctaaatttggtggtgttgcaatgttaattccatcgaacatagcgactatatataacatttccatgccatcataattttctttggaaaaattctttagtgtaacgccttcttgtgaaatagtagttttatcatccgtaaattcataaccagaatctatttcaatcattaaattagcaggatttgtatcgtagggtaaaatggttccatcgtagttataaatcgtttgtttttccaaaattttaaatgggataaatagtgtttgttctgcttcattaaatgttagctcactacttttaagactcttgcttgcttcatcttcaaatctttgataagtaccattaaaattttctaatttcggaaaatctgcaatccctctgaaatcgtcaatttggcagcccataactactaaatcggttaaattgggaaggctttttaatgaactaatattagttatttgcttattataacctatattaagggtttttaaattgggaagcgcgttaattttaggaagtaacgaattgtcaaaatttgattcgtataaatataaattttctaaattagtcatactatttagattaggaattttatcagaagtaatattagaacctgtgatagttaaattattaagtttaggaagttttgttactacgtcataggaagcatttataccacggaatgatattctagtaatattctttgcatactctaacccagttaggtcagtaatacctgaacttaatgaaacattatctagcctactcatttcatcttctgtaatatcagcagtagctggtttcgacatatgagaatttaattgtttttttagttctggatctggaatatttactacatcttgacttgcttgtaatccttgttcttctgcggcaaaactaggtaaagaaacttgagatagtggtaccataaccatggcactacaaatcccgactttcataattttagatttaatcgacatacgctgttgttcctctctgtacttagattaattacaaatgtaatcgtctaaaacggctgtctgctcgtcttaacaatgtaaattatagtccggtatagaccaaataccaatggacaaattgtgaacattccacgatatattaatcatataattaaaaaagaactattctaatcaagaggaatggcttaataatgagctttggaagagtattttattgagtagtaaacgaatcataaaatatggcgaaaatgtgactttttgatggaatacgctttcaaaaaaacaagtatataccgataaaggtctctactaagaaaaaaactccctattcacatagagagatttttccgcttattcaccaaagacatttttccattcgcttcgtttcgctaagaattcttctgcaagctctttggcaccttctaaactatgactcgctgcccaaccgcattgtacttcattgcatgctggaaccgaatctgcggctaatacatccgttaaagtagtagctaaaatttctaaagcatcatcataatcattatggttgataaatgacatataaaaaccagtctggcagcccatgggactaatgtcgactaatttatcggtgtggtttctggcaagttcagccatcaagtgttctagagagtgcagtgcaggcatttccatatgttctttatttggttgcttaaagcgaacatcatatttataaatctcatccccatgcacaccaacttttgttccagcaagtctaacaaaaggcgcttttactttggtgtgatctaaattaaaactttctacgttcattttttctgccatcattgtaccctccttttattcttagttattatatcaaaaaaaagaatccttgcatattttctatgcgaggattcttacttttattcgtctttagcgtctgttgtatcttttatttctggtatatctagccagatagaagttggttcaccttccatcgtttcatctaatacgaaagagccattagaataacgatccgttacacgaaggtttgctacatctatttctacaatttgttctctgttagtttcaataaacaagtggtctttactatcagcaagcgtcagaccgatgaaacgatgcggattacttttcagttcgcgaagcattagtaagccacgttttgctcttgaaattggttcaaattcacttgctttcatttgtttcaaggagccccgttgtgtggctaataagatatgtttgttatcattcggtgtaaggaccactccgcctataactacgtcgccttgtttcagattgattgctttaacacccgcagttctagcccctgattcaggaatttcagcgattggataacgtaatccataaccattcctagtagctagaaaaatatcttcagtgccatcaattaaatatacattcaaaagttcatcttcttttaacttaatggccatcattgatttagaataacgctgcggtttgtaatttgtaatagtcgattgttttgtcatcccgtttttggtgacaaataaaaatcgtttttgttctgtaaaggaatcgatagcgataacagagcgaatttcttcccctgcagataaatcactagctaagtgactaacgtgatcgccaaggtttttccagcgaatatcaggtagttcatgtactggccgataaatgaaattccctttatttgtaaataatattaacgaatcaagagaattcattttttgaatgaagatcgcgtggtctgcttccttcattgctaactctgcaccatttgaagccgcataagaacgctgacttgtgcgtttaacatagccttcttttgttacagaaacaatcacatcttcattagccacaagtacttctgtgtcaattttgatttctgtaatttccgcttgtacttctgttcgacgagcggttttgtattttttcttaatatcagctaattccgattttaagactgcaacaagttctgcttcgtcgccaaggattttctctaaaatactaatttgttctgcaagttcttttgcttcactttgaagttcgtgaatatctgtattagttaaacgataaagttgcaaggatacaattgcttcagcttgtttttcactgaaatcgtatgttgtttgcaagtttaatttcgcatcacgtttatctttagaaccacgaattaatttaatcacttcatccaaaatagaaagagctttgattaagccttctaaaatatgttggcgagcgcgtgcttttcgaatatcatattctgaacgtttagtaataatttctttttggtgttcgatataagcatcaagcattgggataattcccattaattccggacgcttattatgaattgcaaccatattaaaattataacttacttgtaaatctgtatttttaaagaggtaattcagtacgccttccgcgtttgcatcttttttaagttctacggcaatacgcagtccagtgcggtcagtttcatcgcgcacttctgaaatcccttcaatttttttctcaatacgaagttcgtccattcgcttaactaaattggctttattcacttcatatggaatttcatgaatggtaatttgcttcctaccgccacgaatatcttcaatctctgttttagaacgaacaactacgcggccttttcctgtttcataagctttacgaattccgtcaatcccttgaataattccaccagttgggaaatcgggtcctttgacaattttcataatatcttctgttgtcgaaaatggcttatcaagacgtttaattactgcttcaataatttcagttaaattgtgtggcgggatgtctgtcgcgtatccggccgaaataccagttgagccatttaccaaaaggttaggaaaacgcgctggtaaaacagttggctcactggatgtatcatcaaagtttgggataaaatcaactgtttctttttcaatatcacgtaatagttcagctgatattggagaaagacgtgcttcggtataacgcattgcagctggtggatcaccgtcaacactaccgttatttccgtgcatttcgataagcatattgcgtactttccagtcttgactcatccgtaccatcgcttcataaacggaagaatcaccatgcggatggtaattaccgataacgtttccgactgttttagcagatttacggaaacctttttcagcagtatttccttcgacattcattgcaaataaaatccggcgttgtacgggttttagaccgtctcgcacgtctggaagcgcacgttcttgaataatatatttactatatctaccaaaacggtcgcccataacttcttcaagtgctaagtcttggatatgttgttctggattactcaaatgtctttcgcctcctcaaccatcatgttttcattttctaaaatgttttgattatcttccatagaaaactccacatgtttttcaatccactgacgtcttggttctactttgtcgcccatcagtgttgctacgcgtcgttctgcgcgtgcggaatcatccacgcgcacacgaattaacgtacgtgtatctgggttcattgttgtttcccaaagttggtctgcattcatttccccaagacctttgtaacgttgaatcatatagcctttaccgattttttgaatagctgcatctaattcttcgtctgtccaggcatattcaatcacttcttttttaccagaaccacggcttactttgtaaagtggtggtaaggcaataaagacttttcctgcttcaacgagaggtcgcatataacggtagaaaaatgttaataatagtacttgaatgtgagcaccatccgtatcagcatcggtcatgataactactttgtcatagttacagtcctcaacatcaaactcagtaccgactccagcaccaactgtatgaataatggtactaatttcttcgttttttagaatatcttgtaattttgctttttcggtattaattacttttcctcgaagtggcaaaattgcttggaaacggcggtcacgaccttgtttggcagatccaccagccgagtctccttcgacaagatacagttcatttttgttagggtttcttgattgtgctggtgtcaattttccagaaagaagtgtttctgaacgtttctttttcttgccattacgtgtttcttcacgggcttttctggctgcttctcttgcttctcttgctttaactgcctttttaactagaagagagcttgtttctgggttttcagcaaggaagtaagctaaatgttccgccacaactgcatcaactgcttgacgcgcttcctgtgtccctagcttctcttttgtttgaccttcaaattgaagaattttttctggtacgcgaatagaaagtacagcggataagccttcgcgaatatcgctaccctcaagatttttatctttttcttttagtaagtttacccgacgagcgtagtcattgaaaatacgtgtcatcgcagctttcattccagactcatgcgaacctgctccacgagttcgaacgttattaacaaaactcaagatattttcagagtagccatcattgaattggaacgccatttctacttcaatggtcgcattttctccttcaaaactgactactgggtgaagtacatcttttccttcattaatatattcaacaaagttcttcacaccttcttcaaagtggaaagactctgccataccaacacgttcgtcgactaattgaattagcatgcctttaagaagaaatgctgattctcttaaacgttcggataatgtttcataattaaaggaagttgttgggaaaatggctggatctggtttaaagcgaatcgtagtaccagtggctttagatttgccgatttttttaagtgttccatctggtttcccgccatctttaaatttttgctggtatgttgcgccgtcacgattgattgtaacaactagccattcagaaagtgcatttacaacagaagaccctacgccgtgaagtcctccacttgttttatagccaccttcttggccaaacttaccgccagcatgaagaacggtcaaaataacttctaccgtagatttaccagttttatgcattccaactggcattccgcggccttcatcgctaacactaacgctaccatcatcatgaagcgtcacaactatctttttaccaaatcctgcaagggtctcatcgaccgagttatctactatctcatatactaaatggtgcagcccgcgtacatcagttgaaccaatatacatcgctgggcgtttccggaccgcttccagtccttcaagcacctgaatagaatcatcattatactcattccgattcatatttcaaaactcccttcattccatcaatctgcaactttacgttgttcttcgcttaaaaccaccttatcagaatagcattaaccagctaattaataaagtgatagtttggtgacaaattctttttcataaaaaaacaggctctgctataagaacctgcttctttcaaaaatggttgttagtaatccatttcttgataagcaaccttaatgcaataatccatgacagtagaatatcctttttctgtcaaaaaatcaaatgcttcctgattaacaatgccaagttgtgcccaaaacacgtctgcgtctatttggtcgaattcccgcgctatgtctggtaaaaattccgagcgacggaaaacattcacaatatcaacgtgttctttaatgtcagttaatctctttacagctttttctccaagaatttcatttgcattaggatttactggaataattttatacccagcttgttgcatgatttggcttactcggtaacttgtgcggtctggtttatcactcaaaccaacgactgcgattacttttgcttctcttaaaatatgcgctatttcctcttttgttggattttgcattagtctaatcgccccctactattctttctaatcataagctatttttgcggttttttcaacttttcatcgtgttttatcagaacaatttacccaaaaatcttttttttatgctataattctttatggaaaacatcatttcttcttgaggggtttaaaaatgactattaatttaattttgctttctttgttagcttatgtaatcggttcaataccttctggcttatggatcggtaaaattttttacaaaaaagatattcgtgattttggtagcggaaatttaggagctacaaactccttccgtgttttaggggtaaaagcgggcagtattgttacagtgatggatattttaaaaggtactgtcgcaacattacttccattctttttccaactaaatgttaatcatcatttctggttacttacgggagcatttgcgattatcggacatagtttcccgcttttcgcaggattcagaggtgggaaagcagttgctacttctgctggtgttatccttgcttatgcaccacttttgtttgtagcagcactagtcgttttcttattaacattaaaaatcagcaaatatgtgtcgcttagttcaatgattggagcacttgcagcattaattatttcttttttcatgggagactggattttaattatcctcgttgcttgcatcgctctctttgttatttggcgccaccgagcaaatattacgcgcattcgaaacggcgaagaaccaaaaataaaatggatgtaataaaaacccagcagagttatttagctctgctgggtttttattttaaccaatagtaattttatattcagaagcgaaaactgcttctggttctaaatgttcaatacctgctttatctcgaagctcaacagattttccagcaccatctgcaattccgtaccaaggttcgatacataagaaaggcgttcctgcttttgctgtccaaaccccaacaaacgggaactctggaaatgacacttttacaaaatgtggagttttgtctgatttaatcgtaatttctttttgctttaatccttcaaaaatcagtgcatcatttttaaataaatcatagcttagtggcaaatatcttgctggttcattgactactttttcaattttaccactgcgataagggccttccagacaaagtgtttcgagattctcttctgttccaaaatccaaataataatcttcaaatgtagttccgtcagcaagtggtaaattaaaggctggatgcgccccgatggagaaatagatgcgcttattgtccgtattttccacttcataagaaaccgcaactgaatctttttctattgtataaataatcgataatttaaatttatacggatagatcgttaatgaatcttcatccgcatctagttcaaagcgtacagcgttttctgtgtgctccactactttaaaatcacgatcccgcgcaaagccatgttgccctaagtgatacgggttaccatctacaaaataagtatcctcaacaagtctacctaccgtcgggaataaaaccggagaatgacgcccccaaaaggtactatctgcattccataaatactctaacttagtatctttgtggaaaattcgtgttaattcagcaccagcttctttcatttctacaagtagtaattcattttctagtttaatcattgttatttctcctccaaatgaaaccgctcgatttgttcaaaggctttttctttttttagtacaacgagttgcatctcgccaaacaaatcataatgcggaaagttttttcgacggttatcaatccaatctggcgctaaaccatattgttttccccattcttgcagttttttcaaatcgacacatgcaactttggttactgtttttgaatcaggaaaacgatcatctagccagtaatgcgtaataatcgcaatctcgccacgagctgctttttctttccataattccatttcatcgcgttttacaccaaaagccatttttcatcactaccagtcttatttattctaaagcttttagataggcttcatgccaattcgggaaagttcttcttaacgaaacaggccgaaaatcttcttttgttacacaaacatgctctgtttctccagttattgctacttcatttgttccttcatagcaaatttcataaccataagtaacacgaagtccatcatacccttttatccatgtttttacaactgctttctgtccgtagcgcagtggttttccgtaatgaatatgcacatctaataccggagaaaggtaccccgcttcttccatatcaaaataacgaaaacctaattgttcaattaatcttgttcgaccaatttccatccaaacaaggtaattattatgataaacaacccccatttgatctgtttctgcatagcgtacttcaatggttgtttcagcaatttccattctaaattcctccagtcacaactacttcttccttcttattttaccaaagcaattaaaaaaaagctctccctgaatattttcagagaaagcttttttggttttttagttatttttaagtttttcaagttctactaggaatttatcattgagtacacggataaatgtacctttcattcctaatgagcgagaatcaataacgcctgcactttctaatttacgaagcgcattaacgattacagagcgtgtaatgccgacacggtctgcgattttagaggcaacaagaaggccttctttaccatttaattcatcaaaaatatgctcaatagcttctaattcactgtaagaaagagagctaattgccatttgtacaactgcacggctacgagcttcttcttcaatttcttctgctttttcatgtaggatttccataccaacaacagttccgccgtattcagctaataacaaatcatcgtctgtgaaattgctttctaaacgagataagataagtgttccaaggcgttcgccaccaccaacgataggtacgatagttgttaaacctttagtaaacaaatcactgttttcgattggaaaagcagtatattgacttgatacttctaagttagaagaagtttcaccaacattaaataaactttgagtatattcttctgggaattggcgttctgtaagcatttgtttcatgcggtcgttttcgattggtaatgcttcagaataaccaagtaatttacctttacggcttacgatatacgtatttgcttcaattacgtctgttaaagtatcagccatttctttaaagtttactgttttacctgcagcgttttgtaacatagcattaatttttcttgttttttctaataaagtcattattagatcctcctagtattttataaaataaattgtgttaagtctttattcgtcattattggcgcaagtttttcattaacatagttttctgttactttgatggattccatattaatttcaggtgcttcaaaaagtaaatcctctagtaatttttctaaaatggtatgaagtcttcttgctccgatattatctgaatcttgattaacttggaatgcaatctcagcgattctttctacagcttcttttgtaaaaatcaagtctattccttctgttttgagtaaagctttgtattgtttaattagcgcattgtctggttctgttaagattttgtagaaatcttcttgtgttaacttatccagctcaattctaattggaaaacgaccttgaagctctggaattaaatcacttggtttagacatatgaaaagctccagcggcaatgaataaaatgtactccgtgttgactgtaccatatttggtagaaatttgcgacccctcaacgattggaagaatgtctctttgaacaccttcacgggaaacttgcgcatttccgccgccttctttactagcgattttatcaatttcatcaatgaaaatcatacccatttgctctgcgcgatgaattccttctgctgcgagttcatctgaatcaatcaatttagatgcttcatcctcaaaaagaattttcttcgcttcacgaacggttactttgcgttttttcttcttcgctgggaacatacctgaaagagcatcttgcatgccgctcatttggtccattccagttccacgcatcatatcaaacatcgggttttgttgctcttttacttcaactgttactatttcatcatcaagctctccgttttgaaggcgccattcaatttggcttcttttattctttaattcttggtctacttcttcctcagcaggttcatcaggttgattcatactgccaaaaagcgcctctagtggattttgtgatgttgtttgctttttcttttgacttggtgctagtaatttaattagtcgtttttcggcatttttttcagctttcacacgtactaattgcattttttcttcttttactaaacgtactgacacttcaactaaatcgcgaaccattgattccacgtcgcgtccaacatagccgacttcagtaaatttagtagcctctacttttgaaaaaggtgcgcgaacgatttttgcaattcggcgtgcaatttctgttttacctaccccagttgggccaatcatcagaatattttttggaataatttcatctcggatagattcatccatcagttgtctacgatagcggtttcttagtgctacagcaactgattttttcgctccggtttgtccaataatatattgatccagtttttcgacaatttgctttggtgtcaactggttcattaacgttaaatttgtcaaattaaccactccttcaaagctcttctactgtaatatggtcattcgtaaacacacaaatttcagaagcgatttccagtgcatgacgagctatgtctttagcttccatttgtccgccattatgtctttttaacgctctaccagcagctagagcatagttaccaccagaaccgattgctaaaatgccatcatctggttcaataacttcacctgttccagaaactaacaacaatgtatctttgtccattacgatcaacatcgcttctaatttacgtagaacactatcacttcgccattgttgcgcgagttccacagcagctctttctaagtttccattatattcatttaattttgcttcgaatttttcaaataaagtaaaggcatctgcaacggatccagcaaaaccagctattaccttatcatgaaaaaggcggcgaacttttttggcagtgtgtttcattactaccgattccccgagcgtgacttgaccgtccccagccatcgcagctttaccatcgtgctgcacggcaaaaattgtagtagcatgtaattccattttccttaacctcctccaaatttaagctctcggatgatgtttcatataagtagattttaaatgttcttttgtcacgtgcgtatatatctgggtggatgataagctagcatgtccaagcaactcctgtaccgtcctcatatccgcaccgttgttaagtaagtccgtcgcaaaggtgtggcgtagcatatgcggatggatttttcgagttaatgaagctttactaattattttcgttaaacaatatctaatccctcttgttgtaagcggatctccgtaatgattaataagtaatgagtcatgcgtttttttgaaacgagtcattaattctattcgcccacttaaataatctgttatcgcatcttccgcataggcaccaaacggtacatagcgttctttattcccttttcctcgaatcagaattgcttgataagatgtatctaagtcagaaagcatgattcctgcacattcactcacccgaattccagtaccatagagcacctctaaaatcactcgatctctcagtgtaagcgtttcattatcttcataaaccacttgaaacaaagcttccatttcttctgaatagaaaaatttgggaagccttagctgatttttcgcatgtgaaacgtaggtaaatgggttttcagtaatcacattctcccttaaaagaaaagtgtaaaaactccgtaaacttgaaatctttcgagctacagttgttctagaaaaagatttttgctttaattcagttaaataaattcgaacgtctaaaaatgtaacttgttgatactctataatagcttgttcatttaagaagcgacgaaaatcacttaaatcattttcataagccgtacttgtatgttctgaataatttcgttctgagtgaagatagtcaagaaatcgcttctctaactgcccctcttgcgtcatgcgaatacacctctcaaacactatcatgttaacataagaatatgcacgttgcaataattttatacatttttcgcaacttttcgaattaatcaggatttataatcaattcaatttaatctaagcttttatgtgaaaaagtcaacatttattaacgtgatttgtctagaccattcactcgaaagaaaaactgccttttcatcactatcgaatctcttaaaaatataaaagcgataatcgtgatgaaaagaacagcaaagaatagtcctcaattattatagtgtttttaaagttgttctgcaaccttttttattgcatctaatgctctttcagccaatttttcattacgctcttgtttagcgcgaatcttagttggtaactccggaaatagaccgaaatttacattcattggttggaaagatttcttactagcacttgtaatgtaatttgctaaacttccaatcgcagactcaggagggaaaacaatcggctctttgtcttgtacaaaattagctgcattgattcctgctgcaagtccgctagctgctgactccacataaccttccacaccagtcatttgaccagcgaaaaataagtcatttctcgttttcaattgataggttggctcaagtacagtcggtgagttaataaatgtgtttcggtgcattactccataacgaacaatttccgcattttctaggcctggaattaagccaaatacacgtttttgttcgccccatttaagatgcgtttggaagcctaccatgttataaagcgtccctgctgcatcatcttgtcttaattgcaacactgcatatggtcttttgccagtttttggatcttctaatccaactggtttaagtgggccaaatagcattgttttaataccacgttttgccattacttctatcggcatacatccttcaaagaaaacctctttttcaaattcttttaatgcggctgtttcggcagttactaatgcttcataaaaagtgttaaattcttcttctgacattgggcagtttagataagctgcttcccctttatcatatcttgattttaaatatactttatccatgtcgatactatctttttcaataataggcgctgctgcatcataaaaataaagatactcttcacccgttaagcgtttaatttcttcggctagagctgggctagtcagtggacctgttgcaatgatggttggtccttctggaatagatgtgacttcttcagtatgaattgtaacgagtggatgatttttcactttgtccgtgatatagccagaaaattcatggcgatcaactgcaagtgctcctccagctggcacagaagctttgtcagctgattcaataataatcgagtcaagtaaccgcatttcttctttaattacgcccaccgcattagttaagccattagctcgcagtgaattggtacatactaactccgcaaatttatcagtatgatgagctggtgtttgctttaccggtctcatttcgtataaatctacctttacacctcgttttacaagttgccaagctgcttcactgccagctaatcctgctccaattacattaacacttttttccatttgtccgcctcctcgcgcaacaatggcaacacaggaactatccgagtgctgccatttttccatttattgttgtgtggattctttataatcacaatttgtacattgtacttgtacgccttttttcaatttcttctctactaatgcacgcttattacatttcgggcaagctctttcgactggtttatcccaagaaacgtaatcacaatctggatagcgatcacatccgtagaaaatacgttttttcttgctttttctttctattacatgtcctttttcacatttcggacaagtcacgccgatttctttaacgattgcttttgtatttcggcaatctggaaatctgctgcacgcaagaaacttaccatatttacccattttgtataccattggtgccccgcataggtcacaatcgataccggctggttcatctttaatttcgattttttccatttcggcatcagctttaataacgtttggttcaaattgtttataaaactcatcgataactttgacccattcaacttcaccgtgctccacttcatctaattcgctttccatattagcagtgaacttcacatctaaaatttcagggaaatattcctcaatcatttcattgacgatttcaccaagttcagttggaacaaaacgtttatttgttagcgaaacataatttctacgctggattgtatctaatgtcggtgaatacgtcgatggtcgaccaataccaatttcttcaagtgtttttactaatctagcttctgtgtaacgtggaggtggctgtgtgaaatgttgacgctgttcgagtgattcggactgcaccttgtctccttttttcaaatccggtaaaatattttctttttcttccgtattatcatcgttactttcaacatagactttcataaaaccatggaatttgattttcgatccgtttgctctaaagttaacaccattattatccaaatcaactcgcattgtatctaggacagctggtgtcatttggctagcaataaaacgttcccagatcaagcgatataatcgaagttgatctcgagttagatattctttcacttcttgaggacttctcatagcgcttgttggacggattgcttcatgggcatcttgtgcgcctttagcatttttatcagaccgtttatgattacgggaaaattcagctccgtatgtttctttaatataattacttgcttctagaatggcggaatctgcaatacgagtagagtcagtacgcatgtatgtgattagacctactgtaccttgttttccaagtgtgattccttcatatagttgttgagcaagcatcatcgtttttctagtacgataatttaatttccgtgctgcttcttgttgtaaacttgaggtagtaaatggtgctgctgggtttctaagtctttcttttttagttacgtcagttacatcaaatgttttacctttaattgctgacattacttcttttacgtcatcagcagtggaaagttttctcttcttaccattcacgccataaaaattagcttggaattttttcttaccttttaggaagttcccgtcaattgtccaatattcttctggtttgaaattatttatttctttttcgcgatcaataataattcgtagcgcaatcgattgcacacgtcccgcacttagaccttttttaactttcttccataagataggactgatattataacctactaaacggtctaaaatcctccgtgcttgttgagcgttcacaaggtccatatcaatttttcttggtgtcttgaatgattcttttacagcttcttttgtaatttcattaaacaccacacgtaatttatctgattgatctaaatcaagactattggctaaatgccatgcaattgcttctccttcgcgatctggatcggctgcgagatagacttttttcgcttttttagccgcttgttttaaatctttcaaaacagggccttttccgcgaatcgtaatgtaacgaggttcgtagtcatgttcagtatctacacccatctgactctttggtaaatccctaacatgtcccatcgaagctttaactttaaatttctttcctaaatacttttcaattgtttttgcttttgcaggtgactctacaatcactaaataatctgccatatctatatattcctccctgatttgggtcaatacacgggcttaactagttgctattatactattacagtcttagcctcgcgttcaataagtttgcatgctgacttttcacataattcagtagtaaatattagcccttcctactgggtttgtcaatgacttttattaaaaaatccattttatgtgttgtaaaacagctttctttagcaaacttatcttaaaaaatcaggaattgcaagtcaaatcacttaaaaaggataatttgactacttttatggcttaatttgaaaaaattcttctattatattgtttgcatttaaaactaatttcgcaccttcttgaatcaaacggtttgtacctctccaagtatcaatataaatattaccgggaaccgcaaaaacttgtctattttgttccaaagcaaagtcagctgttattaaggatccacttctctcggcagcttcaataataaccgtaccaagagctaagccactaataatacggttgcgctcaggaaaataccatcttcttgcttcttcatttggtaaatactcgctaagaagtaaaccttgcgtgattacttctttggctagtagttcattcgtccgaggataaattttatttactccagatccaagtactgcaatggtggcgccgctattacggaggctagctttgtgcgcttcagcatctattccaagcgcaagtccactaactatcgcaaagccatgatttgaaagttcagcggcaagtgacgcacatgcttttctaccatactcactcattcgtcgtgtccctacaattgcaatagcttgtttttttaataggtctagatttcctttataaaacaaaagcggtggtgcttcatatatttctttaagtaactcggggtagttttcatcaagaatacagaccacactcgcttcttctggcgaataaattgctgcttcctctaattcagtaattatttgttcttttttgtccgcagtaaaaaaatgagttgcaatctgttcaatcgacatctcccaacaattaaaagtggtaattttttgccagataactgccctttttttagcggaaatagatttacatgaagcgatttttaaccaagtttctcgttctttaaagttcatcttctgcacctccgtgatagttattcacaagtgtacaaagattagctctttttgtaaaatcggtaaaattttcttttcagctcaaaaaagcgtactttctattaagaaaatacgcttttgctttaagtatttagctattttagactctcaaaatgtaactttgcttcttttacaggagaaaagcttaacctgtgaattggacaaattccgatagtatctaagccattcaaatgttttttcgtcccgtaacccatattgtttgcaaaatcataccctggatataattcatcatactgttgcatcattctatctcttgtaactttggcgatgatagaggcagcagcgatagaaatacttttcgtatctccttttataagcgataactctgattcagaatatttcagtggcatcgcatcaattaggacgaagtcaggcgctggattcaactcttctaaagctgtgcgcatagctatttttgttgcttcatagatgtttacttgatcaattacatcatggtcaataattccgataccgatggagatggcttcttcttttataacatcaaaaagtatatctcgtttagcctcatttagctgtttagaatcattgatcccaacgacagaaaaatcagctggtaaaatgactgcagcagccactactggacctgctagcggaccgcgccccacctcatctacaccagcgatatactgaaaaccttgcttaaaaagatctgtttcatagcgtttcatttctattaattttgcagctaattttgcttctttttcccatttttttcgggtcgattgaagaagtttctgtacaccttttcgttcgtcttgagtgcaaagttgaaaaaaagggtcttgttctgaggtcactaggctgagtttttctcggataacagcgatagattcactcattcagcatcgtcttcccaattagggaaatcaaaagacattcttcctaatttttgttgacggatttctcgaacaacagtctcagctgcgcgtgaataatcaggatcattataacgatctagaagtcctcttttttcagctataaaagctagtgtttcaattggatcttctgaaactttctctacttttagccagttttgaaggcgatcggggtaatgtttttctaagaaacgtaatccataacccgcaatttcttccatttgtaataaatcgtctttaatcgcacctgttaaagctaacttatatcctatttcttgatcttcaaatttaggccatagaattcctggtgtatcaagaagttctaatgttttccctactttgatccattgttgagctttagttacccctggtttattaccagttcgcgcaatattctttttcgccaaacgattaatcaatgttgattttcctacattcgggattccgagtatcatcgcgcgaattgctcttggtttcattcctttacttcttaaacgttcaaacttttcggccattaatttttcagccgcttgttcgattttgaataggccttttccttcttgagcatttactgctactgctggtaagcctttctcagcaaaataatcaatccattctttggttgttttctcatcagctgtatctgctttatttaaaataatcactcgtcttttttggtggataatttcttctagcattggattggatgaggatagcgggatacgtgcatccactaattcaaaaatcacatctactagttttaatttttctgtcacctcacgacgagctttggccatatgacctggaaaccattgaattgtcatcatatactcctaatctattagttttgcatcttcaattggccaataacaaattggtgttgttccgagtaccttacttagcggaatcggtcctattatccggctgtctttactcgctctccggttgtcacctaaaacaaaataggtatcttttggaattttgccgccatctagttggtctttagaactgtaatcatctgttaagtagccatctttcagcttttctttgtaagtatctaaatacggttcatcatatttttttccattgatgtaaagttggtctgctttatattctaccgtatcgccaggtaaaccaatcactcgcttaatgtattcttttccatctgcttcacgaaaaacaattacatcaaaacgatctacctcgccaaaacggtttataattacacggtcatcactatgaagtgtaggcatcatcgaaattccatccacaagaataggcacgaacaaataaaaacggattataacagctaataacactgctaaaacagccgcccaaatccaagaccataaccgctttaaattcttctccttcaaaaaactgcaccgccctattttttactaacagtctcattataaacgaaaaaactttcatttaatagagaaatccgcgaaaaagtaactttcacggatttcttattatttcccaaattgaattacagtgccgtttacagttttgtcatcaataaatccaaaaactcggctatccgaactaccaccgcgattatccccaagaacaaatagtttgcctttaggaaccgtactttctcccgtcatatcctctaacgtataatccgctatgtaaggcttttgggtggggtccgggttccatagtgttagtgttccttctggcaaataactttcaacttttcgcttgccatttaagtataattcgccatttttaaaagcaattttatctcccggcataccgataacacgtttaataaaatgttcacctgagccaatcattggtggttcatcaaatacaataatatcaaattgatctggatttgttattttttcaataaaaattcggtcgccgtcttgataggttggaaccatagatgttccttctacttttactggtgcaataacaaaattacgaataactaatgctattaaaagtgccgctacgatgacaagcacccagcttaataattgatgcgccccactttttttcttaggcttttcttccaaataatctgccatctatgtctcctcctagaactcttcgcgggtttaaattatcgctgcaaagactttccaaacgaaattactttcccaagaactgtgtcttgcgatatgaagccgatatagcgactatccttacttacttgacgattatcccctaacacaaaaagtttgccatctggaacagtaagagagccgtcagagtacggaatatcagccattgtgaagttaggatcgcccttatcatctgtagtcaaataaccacctgttaaagcgcttttctcagaatctaaatacggttcatcatactttttaccattaatataaagttggtcttctttatactccactttatctcctggaagtccgattacgcgcttaatatattctgcattttcttcatcaggagctggaaatacaataatatcaaagcgttttggatctgatattttgttaataaatagatgttcaccgtcatgtagtgttggatccattgatttcccattaacagtaactggagaaattaaaaaatagcgaataccgaaagcgagtatgagcgcaatgataattatttttatccatccaaatgccccagaaaaaaatttattttcacttttcatgtctttttatcctctccaattattattaataaagtatagcacgaaacaagctagatgttacagtaaaacaagctagattgatagaaaaaatgcgcgccaattacgacgcgcatttcgaatcatgctgatgttttaatagggataatggagccatcctctaattgcagttgcggctcttcttctccgcgcgctgctttctcagtaataatacacttagtaatgtcatcacgagaagggatttcgaacataacttctaacatgatttgttcaatgatagaacgaagaccacgtgctccagttttacgttcaatcgcttctttcgcaatttcaattaaagctgttggttcgaattcaagctctacgtcatcaagctctaacatacgtttgtattgttttactaaagcattcttcggttctgtcaaaatggaaacaagtgctgcttcatctaattgttcaagcgtcgcgataaccggcaaacgaccgataaattcaggaattaagccgaatttcagtaaatcttccggaacgacacgggataaataagtttcatcttcttttagtttcgcattatcagttccaaatccaatgactttttcacccattcgattcttaacgatttgttcgattccgtcaaatgcaccaccaacgataaatagaatatttcctgtatcaatttgaattaattcttgatgaggatgttttctaccaccttgaggaggaacacttgcgacagtgccttctagaatttttagtaatgcttgttgaacgccttcaccggaaacgtctctagtaatagatgggttttcggatttacgagcaactttgtcgatttcatcaatgtagataatacctttttctgctttttcaacatcatagtcagcagattgaattagtttaagaagaatattttctacatcttccccaacgtaaccagcttctgtaagtgaagttgcatctgcaattgcaaacggaacattaagaattcgcgccagtgtttgggcaagaagtgttttaccactacctgttggaccaattaaacaaatattactttttgacagttctacctcgtcttcttttgtttcattggaattaattcgtttgtagtgattgtaaactgctacagcgagtgcttttttagctcgctcttgaccaataacatagtcacttaatatatgacggatttcttgtggttttggcacttcgccaaaatcaacaaattcagaaatacctagctcttcttcaataatttcattacaaagctcgatacattcatcacaaatataaacacctggaccggccactaatttacgtacttgatcttgagtctttccgcaaaaggagcatttaagttggcctttttcgtcgttaaatttaaacaaaatatttcaccccttcgcataggtatgttgcttataggcgattttttcatctcctatgtgtgttaataatatcatttgttaattagaaatgccaatcatctgtatccttatttctacaatcagaaggacacgagtataactcatgtcccccattttttaatgaaattattaaatcattctttgcttatttttctactgcgctatctagtaaaacgtcaatagctttacggatcttaaggtctgatttaagttcgctcatatcgccaagagcagcacgaacagcgtctttttccataccatatttttcagctaatgtagaaatttcttcgtcaatagcttcttcagttggctcaatgttttcagcttcagcaatagcttcaagcactaggttcattttcacgcgtttttcagcgtctttttccatttgtgcgtgcattgcttcttctgtttgaccagtgaattggtaatataattcaggagttagaccttgtgcttgtaaatcttgtgcaaaatgattcattaaatgatcagcttcatggtgaaccattgcgtgtggaatatccacttctgcattttcaacagctttagcaataacttcttcttgtttagcttgagcaacagaatcttcttttgcttcttgtagacgtttagagattttttcttttagttcatctaaagtttctacttcttcgtcgatgtcttttgcaagttcatcgtcaagtgcaggaacttctttagttttgatttcgtgtagtttcactttgaaaacaacaggttgtccagctaagtcttccgcatggtattcttctgggaatgttaactcgatgtcagcttcgtcgccagcttttaagccaactaatttttcttcaaaaccaggaatgaattgaccgcttccaagttctagagaatgattttcagcttgtccgccttcaaaagctacgccgtctttgaatccttcaaaatcaaggatgacagtgtcgccgttttcagctggagcatcttctttaacaactaattcagcttgacgctcttgtaattgttttaattctgcttctaattcttctgttgttagttctgtttcgcgtttttcaacttcaagacctttgtagtctccaagtttaacttcaggttttacagttacatctgctgttagaacccaagtttcgcctttttccatagactcaatatttacttgaggagtatcaactggatcaattccagcttcatcaattgcttgagaatatacttctggaagcaagatatcaagtgcatcttggtaaagagcttcttcgccgaaacgttggttgaaaatttgacgtggaactttccctttacggaagcctggtacgttaagagttttacgtacttttacgaaagctctatctaaaccttcttttactttttcttgttcaatttcaaaagtaagttttccaacattaccttcttgtttttcccattttactgacatggtataattccctccatcatctatttagttcaatttaattactctcatgacaagtttcagccatactcactaataataacacagatatccctgacttgaaaacaacaaatatcattatatgaaataattttgctgtctgatttctaactcctcaataatagaaattgcttcttcaactgctgcttgatttactgcatctgaaatcagactaacatcaccgtacatcgagttggcccatttaaagtaggcattcacccatacatccacttcttttggctcaaactcaaacggataaagcataaataaatgttgttgaataatcccaattatttgttctaatagacttggattactgtgttcaagtttatccgcaaggccagcgaatagttccgttgcaaatgcgttttcggctaacatcggcacctcactcggattaaaaataccatgcttatcaatttttcggacttctatttcttcattcacttctttttcttgcatcagctcaaagatcattgattgcacaaacggggaaaaactttcgtccgctaaaaacattttaaaagccggcaaaaaatcatcaatttctagaaaacgagcttcttgtaaaaactctaattgttccgctgtttgccatgacgcaaaatcacggatatcttttctaggaacaaattgtttaggaaatggaatgacattatttgtgacttcttttgtatcttcctgtttttcttcttccatataatgacgaactaacgtgaaataagtatccatattatcttcttgcatgaaagttacagataactcacctaaaatttccttgttgtagccattcatcgttaagaaattttgacctatttcttgcgcttttttggttttattcgtctgattataaaattgaattaacctatgtacaatttcctcgttgcatggttcttgatgatacgcattttccaaataatgtagcgtactcattttttcttcttcggtcaacgaggcaatccctttttccataaattttttaacgctcattggaaaaaaagcaccactttcactcatcgttttatctccttttattcgaaaaagctttatttattctaactggatttacccttattgtagaaagtctaacccttttcaacaaaaaagttgacttggatttgattcattctacttggatagtttagttctgtcaagtgagttttgtggtgttatattgcgcaaaatcgtctggaataagctttaatttttataagcagaaagatagacctcgatttttatctcgaggtctatcaagtatctagattactttatttactcactatattctgttaaaacttcttgatagatttcctgataaatttcttctatatcctctgttgcttctgttgtttccccgccatctccccataattcctctttgcccacttcttcaaccggaaatttacttattatagcatttgaaagtatatagttgtcgccatccggatttttctctaggaaaagtgtatattcttcccctttttccatgtttttataaccatcaattgttaaatcatattttttgccctctaccataacgttttctacgctatactctaacactttaattgtcgcattctctgttagtttttccgttgtgtcttttttgatagaattaatttgtacatcgctcattgtataaaagtcggttggaaatacattttctttcgtttcttttgtcactgttgttttttcggattttttagtagctttgataataattggggcatctttttctaaagcatccatattttccgcgagttcaagatacttaccgtgataagaaacaacgccattatttgctttgaccgtttctgatgcgctttgtgtggttgctttttcttctgatggtttttcttttacactttggctgtttgagcaagcagttaatatactaagacttactaagcctatgatcatcgttatttttttcttcatcgtcaatcctcctttttacttgtataaggctttgatgccattaaaatcgtctttttgcggtttagttttattgataaaacctttatctaacatgattgcatttctggttttcacatgtcctaaaccaaagccatgaccaaattcatgcgctaccgtttctattttatgattatttgaaagtgaacggaagcctttgtatagcgtaatttcattcttcacgattaatttattagatttgtaataagttgtgttacaaactgctaagacgcttcctttgttcgtatttgaactactgacagtaaagttaggcttcacatcatttcccatcgttaccgtattcaagtacggagaaggattccaagatttcgccccgttaataatgatatttctatatcctctcgctgaaccattaatatacaccttaaaatttttggcgctagcctttgtcatcacatatccaagtctcgaatacgcgcttgcattagtaggtataaataacgaaactaacacaataaaaataagaaacattactaaagtttttttcctcatgttgtttgctcctcttttttagtttcacacaatgtgtgtattttatcaaaaataaagaaaaacactcattttgtgtgcttttactttatttttcaacaagcgttattcataaaaacactttaaatcacacattagcacctcactcaaaataacggcatttttatgtgataaccgtacgcttcctttttcgatattactataacctgatgtgtactttacaaaaacactattttatataaatattataaaaagaagcagatactaatatctgcttcttttttgttggtaatcgtttttaattacttgcatatctaagtattctttataaattgtttttaaatctatatccttcttttctactttcttacaaaacgcttttaattttttcgattcaaaaatttccgagaaaattttctctaccgcacttttcttcccctcaatatagcaaatgtatgcgaaatcattaaagctatattttctcatgacataatctcacaactaataatatcgtctaaattaatatcaattattcgctcgtcaaagcgttcaagtgatacaatgtgttttttgttgtcaatgtggacaggaactacatacttgtatctcacatgatgattattctttaaaaacagtatttctatcgaccaatttctttttaacgcatctgctaacactattgaatgttctaaaatatcatcaattaaattatacatgttcttcaccccttaggaacattatacgaacaaacgttcttaaaatcaagtggtaataaaatatagttgtttctcttaaaaataaaaagcatgctattaagcacactttttaaataagattcatttagttgtgttatttactattgcttttgatttggctgttccgcagcttctgatgcaacgtaatacttgccatcatctttatacaaaatagtccttggaaggtcctctccattttttgctttataaagttcagatccttcagctaacttattagatgtgaaatctttgtctggcgttttatacctttttatcttattctttatctctccaattttctctaaagcgtcatctttatttgctggttcattggtcataacgtatacaagtccatcaacttgtatcattcctacaatgttattcctatcaactaaccactttattccgaataatgaagcgcaaattactattactaccaacagtattattaaccactttttcttcattctattagctctcttttcgatttatttattacgactttggacataagtacttgtagcagtacttgcgtattttgttgtcgatcctgtgtaaattccagcgccgttatattttttaacagtatacttcgtaacatctacattcccatatattgcaggtcttgtccacttttttggattcgctttaataatttgtccgtttgagcctgcttttgatacagacatactgaattttccataaccaatactcgcgctcacattcattgttgctttactaaaataataagcagaaacattatattgataatttttccatccaggatgccatgcgataaatccttttgaaacttttcttgttgtagatactttggtccatttctcataacctagacttgcactttttaatagctgtctttcttgattaactggttcacttgggttgacttgatctctgacaataaattcgttcggtaattcattgttgttatcttgtataccactttcaacttctttttgcgtaataactggagttgtatcaacattccttactgctgcagatacatgcgtaatcggcgttattaccaatagtccaacaattatcggtgctactacatgttttaaaaaaggctttttcataaaatcatttctctccctttatgtataatcttgttttcaaaatcagtctatcataaaaagccaatgtataaccaaaaatgtaatgaaatgtccgattcttgtcatgaacgactaaaaatagagcttatttagattcattcttacacaatatgtgtaatattgtgttttccatcacaaaaaagcacccatttcaggtggttattcacggtttatgcattttcctttgcgctcgtcacaaaaagtacatatccattcaaattatatgttattttttataagaaatatccttatttagccaaatatctattatttcgcatgaataaaagtgtataattattcgcaataccttaaatcattgactcttgataaatgggcatgtaataataaatgcatagatgtttttgcatctaataatttcattcaactattcgcagttttatatgactgcaacctcgaaaaatttcggggtatttttttgttttcgtactcaaatataattgactaatcaaatatatcgcgctataatatgtatatagtaaagaaacataaaatattaataaagggtgattgagatgactagcaagcaaaaagaatttatagaccaattactattagaaaaagaatgggaactaaccaatgatttacaatcatataatgatggtgaagtaactcaggaagttgcagcaaatattattgaatacttaatatcttgtgatgatacggcgaacgcagctgcgattagagtggaaatgatgaatagaatgactgatagacagaagaatttcattaccgaattattatcagaaaaaatctggaaaacgacttctgaaatagaaattttccttagttcgaataatacagaagttgataaatatacagcatcagtgattattgagtacttactatcttgcaaaaataaatataacttggcaatttaaaaggaggaagttaatgatgaatttaaaaaatatttttgaaaaatggggctacgggcatttgaaggaagaaattgaagatttagaggatggctatgaagtagtaataaatgtagtagatagagatacttttaatcttatgaatgatttaaacgaatcaactaaatttactgtttatgaagattgcattaacgatactataacaatagcgcatagctaaaaataaacgtatggaggaataataaaaatggcaggatttattaaaaaatacttagaaagtaaagattggacaatttaccagctaggtaatgcaacgggacttgcacatcaaacaataagaagtgctgactcaaaaactgtagaccaaatatctgcgaaaaatgtgcgtttaatagcagaggtctttcaatgcactcctggcgaattgttagatgaattctacaaaatcgaagaagaaataatgcgctaagcttttgtttagcgtattttttgcataaaaaaagcccccgcacaaagcgagggtttgtttattatttgtttttaagctctacatatttatcacttgcagtgatgtaaaaagtagcgccttttgaatttttaactttgtattgataagccgtgccaactttaactttttcaactactgttgggaagccaatacccttattaacagtgcccgccacatctttatctgcccaagaaggcttactataaaatctcaaactagcagctttagaaactagttttttattcttataagtgttatttgatgttgccggcttagaaggtgtcgttggtttaataggagcgggcttagacgttgttgtcttcggaacagaatttaagcctcgtctttttaaccattcttttgtgatcgattctataatggcttttttattgcttttccaaatcgctacatcactagctgaatcaatgaagaacagctcatgtagtaatgcttgcgcttttgtatcgcgtacaatggctagtctcccgtgtcttgtagaagtgtctgcttttgcgcctcgattttttaggccttttattgatccggctttcgcaactgcaatcgcatcttgctgggctgatgcaataccagcgcaaaatagtgtttcggttccttgaccacctccagaatttgcatgtagttccaatactgcgacaacgttctcactgtttgcgtatttaacccgctctgataaagatttgccgaaaccatttattacatcatgaccgcaacttttagcatatgctgtcgcgatttgcgcgccttctttcgccactgctttttcagtaagtccattgccattcgcaccttgttcataagttccgttatgtcctccaaaaattgccacttttgccatttctattcatcctttccaggttcattatatttttgtgctctttcactatcttttaagtttgccgtagtcgggtcttgaataattccgattagagcaaagatagaagtaattacagtgataagcctattcaataattcgttgtaatcccattcaataccaaatacgtagagtacggattgggcaattaaaaaaagaccgccaactagagcgatcaaccacacgggattcttaaaacgaacaatccaatttattttcatgatattcatgctattcctcctataaaactaattcttggccaacatccagtttataagaatctagtttgttttttgctctgacatttagttcacctcctttgttcatttaaatataaattgtccccagtcccagcttagaattccacctaaaattatccctacaagtgctagaacagaagttataatttgaacgttactaaacttcttatgtttctcctctgactcttcatcgcttatgctttttaatgtattatcgattgagtgtttcacatctgcaatttctaagtcatgttcatgcaactgctttgttgttgatcgcgtgtatcgttccagtgtatccgccatcttttgtgtgtttatggccgtttctttcgcagatgttaccataggtattactaatacttttagctcaactacttcttcactgattttatcgactttgctctcaactttatcgacttttcttgacatctctttttttatatccattccatgctcgaataattctgctcttgacacataatctatttttttcttttcgttttccatagctctaagcctcccatggttgcaacaaatagattaaagcatgcgctcaaagcatatcgactcggcaataaatttgtagcagcgctctctgagctcgctgctgaatataagaacagcactatcgcacctattcccccgccaatcatcaaatttataaatcttgcatttgattcttgaaaagatgcaattagtatcagtgcagcacttaaaataaacaacaacccccatgtatcaattgtcataagattgtccatcagttgatacgtcctgcttttttcaacaattttatcaccagacgtcatcaaaaaaaaaccagtcagaatattataaaatgaaactgataacaagaaaaatagcgcaaaaacttctttgtaattagtttcaagcatttgatctataaactttcgccattttgttttcattaccccatcgaccccttcgttccaacattattactctgctaattcagcgcaatccgcgtcaattaacaatgcttttacttgtgcttgtagcaagcgtggtacttctttgaatgtttttttaccattcaaaatcaaattcaaatagattactgccatttttctcacctccttcaataaaaatttacctatagattggcttcgtacatgtctaccatcgccaattgtgtgtcaatcaactgctgtcctaattttgtattttgctcatacaattcaactaatgcttcctgcgtagttagtaattgttcttcagtacttaacattgcctcttgtagagtcttttcatactgaaactctttttctttattttcgtcaaaaataagttgattcactttatatttataactagcaaaaccacgttgaaaaaacacatcgttttcgtctatctcgatttttttgccaggcacgcactcgcttgtcgaataacctgtaagaaatccttcctcgtttgtggtaatgtaaatttccatatttttcacactcctaaaatatatctaagaatagcatcatttgcatttaagccacttgagtttaaatcgtgccccgcgaaagttgtatcagtgagatataatgttttaattgtgatttgagcgacttgagcattgaaatttgtagcaacagggacatttacgtttgcaccagaatgtttattgatgaaaaatttaggaatgaatgtaaagtcaaagttataattatttgctacgtttgcttgccctggaacaacatcataatcactccaaataaatatcagtcctagcttttgatccgaaactttttggccgccagcaaatttataagtgctaggcgctggccacgctgccccttcaaaaagaatattttgtgtattaaactgctctttaatagattcaagtacattagctggagtcattaatttgtctgtcgcgatacctgctttggcttcatttgtagatgcaatcccatagttctcaacattagataactgcacatctcctttggacagcaaaacatcacctgttcgaccatttatcgatttaagtgattgtaattgcgatattgcttctgatgtaagtaaaggagtcatgtatttttgggaattagaacccatttgagcttcttctaacgaggctatgccaaaattgtttacattactgagcccgacatctgcttttgttatattatgatcgttttttgtacctgtatgacgatttatttcatctacgatttttttaaattgttgctcccatttggtaaaatcctcaggatatacaaatctttcgtcattccatgttgttggaatatatgaatcaatggccattctatttcacctcaatttcaattttaaaatctaatgtaacattctctctcacatcggtttgtgaacttttttctaaaattaaaacattgttttcgtctagtatctttaatgattgtatttgtgtaatcttagggcttcgttcagttataactgttactttgtttccattcctagtagaagtgaatggaagttcttcgccattgattgttactttttttattcgcattcttaaatcttctgcagctctttccctataattagaattaatcatagtatcacctcattattttcaaataaaagcgggtaaccaaatttaatctctcttactcgtctatatcgtcgattgtttgcgattactttctcatcaaatgttacgttttcaattactacgcttcgcattgaatatccaagatgcgcaggtttcgttttctcaatcatcgaagttatttcggaaaagaactgcaaatcatccaagttatagctaacaacaaagtgatataactcatgcaataattctatttttgcactatctttttttaaatattgattaaccagattctctaaaacattcctgctagcgacaatattcgtcgcttgtttatccgctattcgtttgcgccgaacttctaaactatcatctaccgaaccgctaacattaaagatgtcttctaatcttcctattgcccatgtagctgattgaaagtgagcctgatcaatcaagtccaatatgttatcctccgagatttgaagctgttctgattcagctttaagtaaaccgtcaatctctcttattccagaaataatctctggcaatttgttttttaacgcttcatacattctaatcacctcaaattagttcaaaagaaaaagcgcctaattgtggcacttcattttcagcaagaataatattagctgcttcgttattaagctttatattaaagttatctagcaccgacggagcagagaatatgatattgctaataactgcgagtttaacagatgtcaattcatcttccggaaaggttatgctcttaaatagcttgttaatatccattgttatttcttctataacatcgttgacagacttaccgtctttcagaactagttgcccagatatattaatcgttttccatgcggcgctttcaataaaaactttagccccaataggcgctaccccctcacctttttgtggtaaggggtcaatataatttcttacttgttcaaccaaggttgggctagctgggtgtaaattagtatcagttataacgatttttactgtaccctccccgtatcccaaaggataaatttttgcttttccaactcctaaaacttcttctgcccataacttatagtggttcttgtttcccgagaaagcatccttttgaattttcgtgaaaaatctctttcgaaaagtttccaactcttcttcatcagaccctggaattaaaatatcgcctatttctactttcgctagcccataaatattatctaaagacaatattgtatcattggaaaaatcagcatttccttttgtcccagccacttcacattctactacttgttctagaatcgtcgaagaagtcactttgaagtatatattttccgattctacaaaaaaacgcgacccttcaggtatttctattttattatcattttcgtctatacctttaataatcctttgtgtagcgaccgcaggcttccgtataacaccatatggtgcagcagctctatctaagaattcatctggagcggtatcataaaatactaattcaaaagcattctctaaccacgtgtatagtaatgcgatttgagatgctgccggtgctaaagaattccaaatcatgcttccttcacgcttatctaatgttgctggaactgcatctaacattgactccattatattttcgaatgtcatttcctcaaaattgaccaattaaatcacctcctgcacctctaaaacaccttcacttgttgttacatcaaatgaaatatgaaaagagccactaactttttcaataacaaaattatctacaacttctattctatcgtcatattcaattgcttcacttattaatcgtggtatttcaatctcaatcaattcttctgtagattcttcatctgttatcaagtcaaataactcactaccgtaatcgtcactataggccggatatttaaatctagatacttgtatagctaagtgtacaaattgccgaatagcttctaaaccatcgattattctcccggtcatttttttattaacgaagtcgatttcatatgtcttagaaattgtctcaaatgcttctaaatcatcattatcaatttcaatttcaggtgtgctcaaatttatcacctcattcaaattaatctatccaaaacaacgaatagttgaccgccttttaatctagcgcagagtactctatcaccttcaactggtccacgttccataaatccttcagtaatctgaacttgttcaccagaaagaatcagtttatcattgtcatttattttcaccgaaagaggagcaatgtttaaaatttcacctggaacaaaatccgctaaaacttctgaattaagaactccttttacgattgattgaatttgttttttcatcattgaacctccggaattttattctcttcaattaacgtgagcgacatagtatgcaaattccctttgaatgtgtgcgaatcgctatccacataaaatttttgattaatacttattctttttaaattgaccataatcgctatgccacttacaatcgcagggtcacccaacgcatcaattgtcacttctttttttcgtccttttttttggctaagtatttgagaagctcttttattcaattgtgcttgattcaaattatcactcgatgactctgcatgctgaatcaacccatatttacttctcccagagctatcactagcatagccatagagcgtttttttatccttcgtcaaaataacttttacccgagtagctatatcatcaatagaaaaattcacattaaagtctgtcactgtatttgtatcttctaataaaaacattgttgaaggttcattccacttttcaagatacagcttaccggtgtttgcataaatacgatatgttctaccactctgtttataagtttcactaatagctttcaaaataatgtcgtaaagagaagtaacgttcgaaaagacaagcgattttatcatataaccagtgtttgtaattgttccttttggcaatgaaaaatcagatagtagccttgccactatctgatctagtcttttgttattaaaaacgtaaacatctttattcaacaaaagatattgcattttatcatatgctgttacggtaacaatagcatttttagtaatgtttcttgtaaaaacaatacctctaaaaagctctttccctttccatctaaataaaattgtgtttccttcctcgacattttgcttttgatgatctgttccataaggataaaacaatttaaagtctagttttcgaggagcttgatatctttttccacttagagtaacctcctctactggtaatagaatccaatgagtcgacgttattaaaaaaatttctatcattttaaccacctcacggaataattaatttttgccccggatatatccagtgacctggctgccttaaattacgtttatctctttttactaacaatgccttatttttattccaaatcttgcgccaatccgcgtttctcccgtaaaattttttacttaaatcccacaacgtatcaccttgtcttactatataagttttaactttctttttagcaactggtctagattttgcaactggtctagattttgcaacttgtttcttttttatttgtatttttttgatagttacttttttatatatttttaaagtaatatcgaaataccagtcgcctacttctccagccttttcgtaataattaaatgattctatagaacaagtgaagttaattccagcccccgtgacaatgaattgaatcggagtcatattgctcatccaattttcaattctatctatatattgctttgcatttagtgctggtttaaattcgcaatacggaccaaaatttttgggaaaaaatgccgagaaagcaaatgttttagcacctggtttttgaattattgtcacttcgcctaagctagcgatatcgaaattatcgtttttcccattaattgaaacctctaatttttcaggaagaacggggagccttgtcttggttttcccttgatttatccagaactgatagacactttttttagccatcttgaataccatctccactttcaaaatcttcatcatctaatgtttgacgaattacactaacaactcttccttcaaaatcttccatatcagaattattagcaaagtgattgtctccgttaaagtttacagtcactattttatcaccacttttagtagatacactcgcaggaccattagccgcttgcgcaatctctggagttacagttatcgaatttgttgttgcaggaccattagcacctgtagaaagcattgctatagaagctgaactagcaggtagcggtacagaaggcatttgtataacgttattaactgtatttctttgttgtcctcccatatcgaccccgagagcattagcagctgctccaagaagcatttttccacgccctacattttgatcaacaggaataataaattctttcttaccaccttcaccaatccaagatagttgttcttgagtaattaaacctccggtggcattttttcccactgatttcttctttaaaccagtcttttcttcaccaattccagtaaagaaatcttttgctccgtttacttttcctccaatccaatctttcgcgctattagcagcttctcccgctttacctattacatcatttatccagccaaacgcatcttgaaaagctgcgctaatatcttcagcgaccccaactataggatctcttacatttgcaccaaaccattctgtaactccattccaagcactaattactgcatcgtgagcagtttggaagaaactacttatagcttcaccaatagcttgtgccccaacctttaatggttcccaaatgttcgtattaaaccattctacagcaaggaaccaaactaattttatcatttcccatgaggttgaaaagtagcttgatattgcataagccacagttgaaactgctaatttaatcggttcccaaatgttcgtattaaaccattctacagcaaggaaccaaactaattttatcatttcccatgaggttgaaaagtagcttgatattgcataagccacagttgaaactgctaatttaatcggttcccaaatgttcgtattaaaccattctacagcgaggaaccaaactaattttatcatttcccatgaggttgaaaagtagcttgatattgcagagcctacgatttcaactgctgatttaatcggttcccaaatgtttgtattgaaccattctgacacaactgcccaaacaccagaaattacttcccatgcaactgtgaatatacctacaattagattaattttatcaactgcactgttgtaaataggtgtccaaatagttttatcaaaccattcgacaaatcccccgaatgtatttgagatacttttccatacacttgagaaaaatcccccaataagctcaattttctcacttacccactcagtaatattggtccatccttctttaaactgtatccacatatcacttgcatagctagttacatcattccatttttcagaccaccaaccaccgtcaaacaacgtctctgcaagaaaatcttttacttttccaaaagcttttccaacaggtccattttgaacccatttcccaattcgctgtcctagctcacttccggcgatacctccgataattgatccaataacaccaccaattgctgtgccaatccctggaataattgaaccgatagcagctcctccagcagctcctgcagccatacctcccaaaccgcctccaaaatctccgaccttttcgccagcattttctttatttatgccaatgagagaggtagccgataatgctgtgccaagcacaggaattcttttggctactgaacctaagccttttaatcccttgccaagtgctccagttttatccataaacttacctaatttagatatagaaccaggtaacccgccttctgaatatcgtcctactcttgtggttttcgtagggtctactttcatagtagcaggaaatattttacccattcctttttttcctaggcctttaatgcccttgcccgctattttactaatcggttttaaaccagcagccataatcagccgaattcccttgaagcgcaaagcaaatcctaataacaatccgtcagctaataaagttccccatatgttcccttgatcctcaagctctttattgccaatcattttgccaaaaacagatttaagaccacttgtattgatatcaagtaatttagaaaaaatttgttttattagcgctcctggatctagtgaatctagaaatgatttcccaaatgacttagcagcttcgccacctacattagccataatattaactaatcccatgcttcctgctacttcttcgcccttcacttcactgctaaacaaaacaccagtaataaaagcatttattgctgaaccaaaagcagaacccgccttactaaaaaagtctttaatttgattcattccaccatttttgtataaccaattatttatatcttgtccaatttcatacgtgatttgtttgaatatgttagtaactgatgttccgtaactccgccactcattgatagattccaatttcttaccaatataactaaataaaccatcgaatttttcacccaaccagctagcaatctcagaaccggcttcaactgccgtttctttccacgctgcccatgcatcttggttttcttctaaccacttaataactttagataatcgaggcttaatcgctgtttggaatccatcacctatacttctaaagaatgagcttgtataacctttaatagttgaaatcattcctgtataggcttgcgaaaaccctttagctccaccagaaaacttgtcttgcgcatccttaataaaaccgtcaaatccaccagctgcatccattgattctttggtatatttcatattaaattcttttaatcgttcaaattcccccatctgcgcatcagctaatgcttccattgactccgcgactgtttttcccggagttaaagcagccatatcgacagatagtttcattaacttttcaaattcttttctattctttgttaaacctgttgctcttgccgcggctggcattaaatcagccgagctaaaaggagttgaatcagaatattgtccgatccatttcatataatcttttgctttatctgcagactttagccagtgtgtcattgacactgtatattcttcaaatgtagctgatgatttcactgtagcttcataaaaacttttccctaatacagcacctatagttaccgtgaacaaagtcggcagagaaaacaaagctctttttgccgcaccaatggcgctagctgtataattcaaagctttaactggaatattaatcattttaggtaatacacttttaatttttgaacccattcgtgcagcagtactggttaatttatcaatagcagtgatagtaactgaataaccttttgagaacagtttctttgtaaaagatgcagccttttttatcgtttcagttgctgtatcttttgccgataaaacaatttcatattttttgaagtttttgcgacgtaaataattcattaatcgtccgacagtgacttcaaaaggtttgccatccgcatctatttttgtataataagccttaggtaattttttatccaatagtttaccaattccagcaacctttttacttgcattatcagcaatattcaccccaattgaataagttttaggcatatttttttgcataaaattcgcgatgctttttgcgcctcttaatgctgtatcattaataccaactgaaatagcataagattttgcaaaatcttttgtaatcatcttttgaattcgagttgcatttcttgtaacatcatcctttaatctaactttaaactccatatcttgcatagacttagcttgtttatccattttttttaggttattagttaatttgtctatcttagattggattttatcctgcatatcgaataccgcggtcattttaaccaagacaattcctcctttctaattatttttcatttccttttcagctaattctaacttgtattctataaaagcataaaacaaagctctctgttgaactggtaaacgtaacatttcttgaatatctgacggggattgatgtaattcagtaaaggcataatatgcatacgtcgcatttctatccccgccctttattagttttttgctagttcaatagactctgcttcatcgtcgatttcgtcatcaaatccgttggcttcgcttgctgccgaaatccagttcatgtaatcgccaggtacggataaaacttttttcgcgacttctagagcagagggggatttgtatgcgtttagcaactctttagaactaaacttcggataaacagttgattctaatgccaagagtgcttgaaatttatcagaatcaaatttttcttctggttgacgtccacggccttttggaattctttttgtgcaatcttttcttagttcctcgagacgttcagaagttacattttcaaatacaaatttaattacatttccatttttatctttaaaacgattcgagacagcacgttctagtttgaccttttcttcatgttttccaggaagaaatgctgtgatatcataaactaattcttcatttgattcttctactttttcaatttctctatctgctaccatttgttatttctccattctttgtttggattttttactagaaaaggcaaaagccacaagcttttgcctttataggcttaattaaaatctgaccgtagagattccggtacatcgaaatcttcaaaagtgaacgggatttcttcctctaatgcttcggaatccacatccaaaccaacgattttagcactatcaatatttacgtctagtaatgtaatgcgttcagttcctcggccagatgacgcatctgcaatatatgtttgaaccgtgaagtaagggtccttacctgttttaacatagtcaagcatcattttcacaaaacgagaagtaactttgtatagtgttagtgttccagaaccttttgccccagtggtttttgatcctgtcatacgacgtcccataacatttacttctgctttatttttttcaatgttggcttcacatgtttttacttctgcaacttctagtccatctataaacaatccgccttcttttcctgagattgtattttgagctttaaatgacatcttatttcacctccgtagtaaagtagaatttctcgcctgaatcaaccggctcgatagattgatttacaatgaatccgtcaacattattatttagtgaaactgtaatatcagctgtggagtcaaaatttgtaattgctccactatcctgcaattcatttaaatatgctgtttgcatcgatagaataaattgcaccccattttcatctgcgggaatgtctgtattagcatcttttctttctttaatagcgtctaaaatatttctgcgtgtatcattattaatgccatctaggattcgcgaaatcttattctttcggaatttagagcttttttctttactaaatgtagttaatgaattaaggtcctgttctacgtatactgctttgtcgcgagcatcaaatgtcagaacaaattcaccattttgtaatgcttcctctgcttcatcattggccaatcgaggtgtagcatcaattgccccatcatatttaacaaaagtattagacttcagcatagaggcagaagcatcagctccagcaacccaagcaactacttgatgaggctctaaaatagtaccatctcgtaatgtcaccccattacgaacattgataatcccttcgtaatcagcaggcatgttggcaaccacacctttgattttcacgccttgctcgtctctcatacgcttaacaaatgaaacaaaagacgttttcaaagcaacgtctgaagatgatactggaaacgcgatagtatcaaaatattcaccttccgcagacactaggaattgggtgtaatccaagtttgtaacaggttgatctgtacctccaactagcgtagttccggatgattgttgcaactcactagtacttgtcgttttaaaggaaacgtagttagaatcgattagttcagatgccgttccgactacttgtttatctacagcaacttcattcaagtaggtagtaacgtcttttttagaactatcaaccacattttcatctactttaatcgtaatactattaccaacaatcccaccatatttggctgtaactaccacatcagttgccaatgttgcagttgctttaataccatcatttaaacggtatactagcactgtttttgctaatttcaaagtttctcgtaataacaagaaactttgatgcgctagagaaaggcctaattttttctctacgtcctcttctttattgatttctacaaactctttagctgctccccatgatgcagctaaaggtaacgctacggttcccctttcgcccgctttagttctttcggccgccgctgctttaaaatttgtataaatacctggacgaattttttctacaccggcattaaacgttcctccactgaccatatcatttcaccactttccgcaagaaattatcaattaaatttcttgcttccgtttttgtaatttgatttcccgtgtgagcaaaaaaagcaccatcgataacttctggctgtacgccaaaaatagcacgagaatgctctttcaactgttcaacagaaaattgtgtttcttcggcctgttgattttgtgttacatcagaaacctcaaccgccttctttgtcacattttttacgttagccattctttagacctccatttatttgtagtgcgttctcatcactaattaccatcttcgcctcagtgtgataacgttcatatgaatcccagttcagtataatactctttgaaaactcatcaccatcccgaatatccacgctttttagtcgaataaaaaaacccgactcttccccgtccggctttagaactggaattattagcctcttagaataaaaagcgttcctaacgacttctgcaattttgaatgcttttactttatctgaatcaaaaaccttaatattccatatacaaatgtttttgaatgaagataaagaagccccaacgccactaactgaaggttgtggaaagtacaaactaggacttacaaaatttgttggaacacttttttcgtaaattttgatattcgatgcgatatctttcaatgatttcacacaaaaagccattattgaacccaactcaacattttttgtttccaaaatctcacctcacttaaaacattggtccataaagtcctgtagctgtttatccattcctttttgaaagagcttttcaaatattgaaattgccacatcccaataatttgtcccatctatccatttgattgttaacagcataccggttgttgctcctggatcatacgtgaatttatcacctttccagtatcccggaacccagcgtctatccttacctgaattaggattaattgtaaaatgtccatcattaacataccaagcataatcaacatttgttccaacttctaaagacatccccgaactagacataataaatacattgccagcagctgccttagaaaacgaatttagtagtcttctagtatcaactgtctcagatgaaataatctcatcttgcacaatatcaagaaaggccattccagaagcttctagccattctttaaactttttaggcaagtcttttttgaatgtatctaattctgcaataaattcttctaaaccttcgatttccaatcccattacagtatcacctttcggaatgcttccacttcaatgtgatggtttttaggacttatcggctcttgcaaaataaaaacatatccgtcagctattactttatctaaccgacggacatcaatatttttattaaaatgtaaaagccaactctgtattaaaatattttgtggttcaccctgcacaattgattctgacttcttcatgtagtaacaatcaattgcttttaaatctggagtgtcactatattctacttcatctggcaagttggaaatattaatcccaaagttaccctcttcttgcttttctttgcccgctaaatgaaaaatatcgcattttttatccagcatttgtgaataactcaaattaaaaagcccccattctaaatcggaatttccgtttatctgtcgacttttgatctaaataatcagcaattaaatttgatacatctggataatttattgattcgccgtttgctaatgaataagaatagtcagcaattttttcagctgaatagcctttctgcatagattcgctagtattatacagagctctaaattgagctagtcgtaataaagctagcttgagcgtttctggaaagccggtttcttctacacttctgctttttatatcaactaatgatttacccaacgcagcttgaagatccatttcagcttctaaaatatccatttttaatttttcgggctttctttctcttactgcttcaaagtctgagtatgttattaattcttcaggcgtgatataggacattcaaaccactcctagtctttgctgctttttttcgcttttttcacttccgaagtctcttctgttttttcagacgtctcttctgtaactaagaactcctctgcatcttgtaaaatattaacaatttcttcgttgatgtcaacaggaatatcttttttaaaaagaatattttgtggtaacaaaacataatgttcaccttttgtaagcatagctttatatttgctcatttaaatcactccaaaaccttagtaattttagaaactgcatcttcttcttcgaacactgtatctaatttagccgttaaaacaataatgaattgacgagaacggatatctttatctacctcaatactaatattccgtgacattcctaaaataatattttttgggtgagttagaataatgtctgaaacatcattacctgcaccatcgccatatggttgtagatttgcgcaagattgaattggaatgccaaaaggacgagcagttttaccttctacagcactatccccaagagaagtttgacggtcgcctaatttatcaatccattctgtttctacgcttggagaagtatagtatcgaaagtcttgcggtgaacgtaaatatttagccggaataattttcttcgcatttttaaatgccgttctggaaatttctcccgaactattattaaccaagtgagatgttgccaatttacgaataccatccaattgagcaagatagctatccgtagtattacttgtatcaccattaaccataagttcctcaatatctaccgctgcacgttctgctaacatttgcataatcgtgtcttttaaattacgtttttcaatgttattttctaaagtatcatatgttaagtttatctcagcgattacttctttagcattaagcgttactttactagttgatggctttgtacgatctgcctctgttaacccaacaccttcacttgcagcacgcattatacgttgaccgaagccaattttttcaataatttgtctatctgactccatctgaactaaacgtgcatcttttaaaattgtaggtgtatcttgaaccatacgaataaatttgctcgcttgtgccggattcattcgaccgccagctgataaatcgcttaatgtcattgatgctttttcgataatagtttcattgttcattttcgttcatctcctttaaagtagtccgtcccaaacggatttattttctttttgaatttgttctccttcaacctgattagaagtcccccgtgcattttccactttttgcaaacggtcgttaattggctcaatactttttccgattgtttctttgatgatttctgctaaatcttcttttttaacttctttttctttcttctttgcatcttcttcttttaaatttttcttttcttcttcagttagtaccttatcttcgtcctttactttgtcaatcgagtccaagcgctcaataaccggttttaacgctgactcaatgattttctctaattcttctttgttcatatcttccacttctccttcttttttgaatgcttttaaagcagcttcagttccactaccctcaatttcattaatgattgattgaaaatctgcaatagcatcattaattttttggaaatcaacactattatggctttgtgcattccaaatctcgttttcaaacacgttcaaagccgcgcggacgttttgtgttgatttacctttctcgtaaccatctcgaacattccctttagtgaaaaactccttcattaatttaaaaaagcctttttcatctttggtgatatccgcacgctcttctgattgctctacaacttctgcaattccagccatgctataaccggttatttcgccttttttaatagattcccaaatcgcatcagaagcctttgtagccataacccaactaccttttgtaataacttggtcactaatactaaaatcagtaggagcaatataactttcaaccacttcaccaactcccgcattgaaatcgtgttgcttatcgatgttacgtgcatctttcataaattgatgtgctgctttttcgatttcctctgctttcatgaaatcaccgtgagcatcttcaacatccggctcataaactaaaccataaactaattgtttagagtcctctttattaacaaatagctcaacctgcttctgtatattaggttgttcatttgattttgttaagaaaaactgttttttatttgccgctttatcaacatatgaaacataatttatctttgcattaactaattctctccccatatttttcacctccttcaaataattaaagtttttttatgggaactttttaacccaataaaaaagacttagaattaataatctaagtcttttacatttatttttctcctttttctaactttggaataagaggagcatcgtatgaagtctctataatttcaccaaatatccgatctaataaaaactgataagcaaaagcagcgttttctagaccattctctggtatataaagatttggcgggatataattaccatgtttgtacgccgatttaatcaaattaaccatctcgttagtgtcggattcaagctgaccatctttaaattctactattacaatctcacctgcaaattttcctttaatataaaagtagttcttcattctataacctcgctaacattcctatgataaagtgaatataatctgtatcactaaaaatacgagtgtctgcttccatcatctcttgtaatcctacactcattatttcataaccggttcctgcataatcttttccaatgtacccaataacgaatttatccaatctagctatttcttgatcatcgtatggataacctaattgtaccaaatcgtatcctttcgttctacgctcataaaaaagtttttcagcagcaagaaatcccggtactgaaatttcaaagtgatgcatcatttcatggattattgttgattttgtaccatggacaccagcgctaactatgctgactcctttgtatagttgttgtgatccacgctcttttgttaaatttaaaagtaaaacactgttcttgttcgactcagtaatccacgatgctggaaagtatttcttattatttatcaaaatctgtttaaggtataaatctgagttatctaatatattaagcatcttaacattgccgaattttcgtatctttttcagttccgaaaaaataagttctaatcttttttctgctgctttttcttgtagattgcttgttaagaacctcgttctaatttgctcttttgcagttatcttatcaaaaatcaaatctctattagccttatcattaatctttttaagacgctctattctccttgtataaaaattaactttagattcaatgtttttatacactacttccccagcatctaaaatatcctgttcgttctttattttttggccaactttattcgccaatttttttgcatctttttgttttttagtgtacggattcttgtctaaatcgtccataacttcttttcttgctttttctttatcttcttttgtccatccgagaatctcttcatttacagctggtccaagggcacaatgacaatgtatcctttcagaagcagacaagtctgtatctctcggatattttgctaactcgccgcttccaggtatcgtaaacgtttcatttatctggaccacttttccacttaattcaatatgggatgagcggggttcgattcctttaccgccggaatgcttccatttcttgccttcaactgatggtgattgttcaaaagcttcttgctgagcaacactagctgctgtcaaaacttctgtaatagccgttgtccttgccctttttcggtcaaatgcgggtaaatcctttagcgctagctctacatgttgaatacctttcccttcactcagtgcctttattagcaccccctctacttcggattgagtactaattttcattaggttggccaaatcctctgaccattctttaatccagctcacagaacgtccagataaacgtttgaaagagacatctttatctagtgacttcataacagttttactaatgtcttttgttgttgctgtaagaaaatcagatgcttttttagacatatttattctaaaatcatcacctataaacaaatcattagagtagtattgaaataattcttcaatcgtaagtggtttttctgcctttattacagtttttttaagttgattaatataataagacctctggattagaagaaggctagaaatgtccttctcgaacgtctcaacaaatgcgggaatatttttcattcctagttgtccaagtagttctttttcgaattctccttcattaaccttctctactaatatattgatagtatcgataaggttatctatagcgtcatagtttaccattgtccttcaactcctgtaacaaatctctcatctgtttcattactaatacgttatcgtattcagatagtgatttttgaactgtcttcggttccgaaacagtatgttcattagattgtccttgcatttctgcgagaagaatagatattggtttgttgtattcctcaggtaattcatctagcttcctattcaataatttttcaagcattggacgcaaatcattaggaatgacggatgctgctgagataaatggatatatagcattggatattgaagcaatatctgtaagatcaggactttttaatactaatttggcttcagatatatctaacgcctctaaaaaagcaccatttatcttcctggccaactttctacgcatcggttggaatacttgttcttccgtcgtcttccgtgctgtttctgcagtggccttattatattcgtccgcttcacctgtataaattggcggcaatcggaaagaagaacgcatttttttcctgtgtgttgcatcatattctaaaaacattgcgtccttttgaatcatatctgccaatgattttatttctacttttacatcagataagtttttatcaccattagcatttgttatctcttccccttgaacttctaaaactaagaattgataggcattttcagtccctgagacacctttcatgtactcttctaagttgttatatgcatcttcatctagcaagccaccctgaacaacaacagcagctggaacgtgacgcccattaacaaagtacaagagatttaattcctctgcctttcttgcgccataaagactaactacgttaccaatccatcgaggaaccccataggcagaggtcccgattttgaaatgaataatttccgtagcatcacgaaattcttttgattctaattctgattcttccacatagttcccattggtactatccattattcgtggatcaccgtactctttaaaccaaacttttttttcatcaataatttgcacaaatttacggaatcgcttattccgcaaaatattaaccggctcccctttttccatgattgtgtatcccacttctactggctctgtttttttacatactcgaatatattgactatcacaatgtactaactctacaggttgacctttgccatctcgtaacacttcaatataaccatttcctgttttctcttgatcctcgataatattttgaaacacagtttctgttccttcatcgagatttgcataacgtatgaactcttgaagtctttttgtttcactttctgctttagctttcttttccggtgtcatatctttgctatttaaatctaatctggactctgcatctatgccaaagccaaagagattagtagtataagcatcaatacattgttgtaatacagtcgaattctctgttattttagatagttcttctaaattatatggtggtctaattacttggctgtcatcaccgtatataccattaaatgcatcttctttggaaatttggtttgatagtgtattatttttttctgcttttactactcgcgctctacttttatttgccacgttttcttcgctcccttcttgctcgcctactacggtctgttttgtctttaatatcagctacttcataaccgtccagcccataccaaatcgcactaaatgtatgtggatcaatattaaattcatcctcaatagtttttcctaatttatctttagcaaaagttaaatgctttaattcgtttatagtgttgctacagttacttgatacataaatatgtctgaaccgtttaaccttttttgtgttttgtaaacgtgaccctggaaatttgtgagctgcatacataacaaatccattatcactaaagtatttaattgttttcggctctgcggaatcagcaaaaattacttcttttgtctctttaaattcctttatatcttgagccgtcacatcatccgtattcccatttgcataatattcaaagtgaatatataaatctttcttgtcagggtctattgtcatactgagtaatgcattcatggactcaacaaaaccaaaatccattccatttcgattaattggattcttaatgttattgatggcttctatcatccagtcgtggtccttctcttctaactgcggaagaactttagtaccaagcacaccaaatctgccttgccgagcaactcgatataaatcaggatcataattcttcatatcttctaagtcatcaatataatcttgagttaaaaaataattatcttcagcaacgctatgatgataatacgtattattctttttaataattcgcttttcatataataacgaatcactcaatataaaacgtttgtttatgaagtcctcaaagaaatgtaaatagacccaattatctatactgacagggtttgaagttaaaataatatgtgtttttaaaaacggatgtcttaaccgtcctaaaagttctttgtatgcagcataactaatctctgagcactcttctacccaaataatagaaatattagctatagactttaacttactaggtttatccaatcctttaaaaattatggatgacccattaggaaattttattttcataggactttgagtaattacaactttccttttacctctcccaacaacacccatttcctcaaggatttcagttaataaagcgaaagtagaatccttgtgcgattcgtgaacatccctaacaactaagcattttcgtttttcttcaaataattttattataattttttcagctgttgcatagcttttactcgaaccataagcacctacagcaagaaatgttttttgtgtccaatcaaatacgtactcctcaaaatgagggttaacgactaaatcaactacattagcttctaccaagtttcttcaccgcccttgagactctaatttcaagcggtttttctaagtctatacctttaagctcttgtatttcgagttctagcatttcgatttctttttgtgttttttcttgattgagcggtagcatagatagctgagcaattattgcagacttgtctctcaatgctctaagtaaaacaccgttttgtcttgtaatagattcttctagccgtaaaacatcatctatcttacgtttagtttcttctttttgttcaacaagtactagctcaggaactgtcataattgctttctgtccgtctctttcaataacttttcttatatcttgttttaagtaagctttttttatctctttttcagactccgacaaattattttctaattcgtttagtcgtttcatcattcttcttttccgaatatattcatctttaatgatattattagcgtgggctagggggtggtctgtcagagaattgtatatttttttttcttcatcgctaaagtaatcaggatcaataatttcgaactctcctgtaaaaagtgcattcttattaccaaagggtgcacccccgccagagttacctatcgcgtttttattgcctaaaggtgccccaccgcccgaattcccttttgcgtttacatttccaaagggtgcgcccattttttttgttttggatgcacccttttctttttcatctttccaaccatatcttctaatccacgccttcaaggtattcggagatatgccatatttttctactatttctttgttcttcattcctgccaaatagtctttttttatgagctctttatctaggttatccatgacacatcaacgtcaccaccattacttatgtttatgttcgtttttactttacttaacccctgtacactttaaaccaagatgcaccatctttactttcactctccgaattctcatcctctacagccatgccagcaagattatttaatataaacactacgcctcttttttcaccttctccatagtaatcgaatgtaataattttctcgtcaatctctacattttcaactagatcaaattccatctcttgtccatttttagtccaaaatataagggtcatgtttattctccaatctttcaataaaagttaatctcttcttagtaatctatctgcttcaatgagggttttaaggtcatttacagattcaagacgtatattgccttcttgtagattattaagccacttccccagcgtagctcgaataatttttttgtattcttcatctgttttagcttcttcaagagctttagttatctctaaatctaataaatcatcatttaagttcccatcaaccgaacgctcgttctcctttttcattgccttttcaccagctttctattagaatagaaaaagagatagcaatgtctaaaacctcgcgaggtctgtttgctatctcatggccagtgatggctctatgggaaggggtgttaacgcacctcttcttttttatcttaaaaacgctgctactgaaagtaatttaggcttttgattatactttttagcaatctctttcgatctagtattaaaagcttccgcgtatggaattatttgtttcttagctgtttctctatcaattatatttcgatgatatttcattttagctgtgtccgctttatcttttaatcgttgaatatcttctctcatgtacaccactccgtttcctttatgctgttactgtaagggatatacgtttaaatgtcgatagattcaagcgcttcttctaaattatcttccagtacctctaaaatggggaaatgttcttgtatctcatcaggatttcctttataaaacactaaaacattctggtgaatacggactaacttcctgttacgcatatttctgcgagctcttaatgctcctgagcctagtgagtttaacaaaatcaagtcattatagaagtaaataccattcttctcaaataccgatttagtaagacctgtcaaatctctataaaaacctgctttatctcgtacatctgaaataaccacaatggcaaatcgattatcttttaatttattcgcacccttcgccaatatctcggagtacactttaataaattcctcgtattccatgttgctaatgtcttctttattatctgaatatacttctaaatcaaagtaaggtgggcatgtaaataataagtccatcgagttatcttcaatatgtttatccgcgtttaagctattatcggtaatccaattaatgccatctaatccgatttctttagcattaatgcggttagcttctacttgttcttttcttaaatcaattccagtatattcgtggccaagcacttttgccacaataccccgaacagagccgccagcgaatggatcgtatattttggcagattctccaggagtaaaccatctgtaagccaactcgcaaagtacggggtcgaaaatactcgttcctgtcaaacttgctgaccgcaagctagatgcaaacgtgagattaccttctcgacctaattcgcttctaatccctaaatttttccattggtccttcctatccctccacctctttgtttttgaatctaaatacgaaaaaggaggaaacaaaaaagactcgaacagattcgagtctaacgggttttcttttactttatccacagtagctggaggtaattcgaattctttaattaattcatctatttcaagtgctgagaatcctgttaaatttagcatttcttcatcattaatgctttttagtaattcgcctaatttatcaggtactccatccgccttctattttatttaaagcaatattcaatgctttctcttgatttatatcaaggtcaactactgatacagtcaacctttccggattttcctcaagtaaaattttaaaacgctgatggccaccaaccaaattaccagttttcttgttccagattaacggatcgatatagccaaactcttcaattgatttttttaatttttgatattctggatcgtttggctgtaaatccattctcggattgtatggtgctgggttaattttgcttacttctatttctttgataatcattttatttcctccaataaaaaaagagccttattggctcttctagctctttttccactaatgatatttacatatcaacaacttcaatagttaatttgactttatctctatgctttttatttgattcatctacaaccaatatttcccccgtaatgattcctcttgcatttttttcttttaacagactttgaaaatcattataaatcaccaagaacctaacttctgaaaatggatcaacaacgcatggagtagttttacccattgcagcaaaaccaaccagcgcacttagtggtaattttattcgtattgattctgaaacaaaaaataaatctcttatttgtactgaagtaatttccaagtttgcgacagttacaactaatgtttctatgttataatcagaaaccgttgctaaagttcctatctctttaatttcatgtgaaactaataattttttcttggggttcctgttagccaaatacaatgacgttccaaccgctagtaatgtcccaattcctgatacccattctgccaaacttcctacttccattcataaacaccctttttatttttaatataacaaacaaaaagtaacgtttcaatctttagagggaaatatggtataaagatttcaaggagtaactacttaacaaaatctcataaatcaattacagccattcaatcctaataattaaaaaaactccatatcagaacgtatctgccctgggggtatggaggtattgacgttaaaagcactcggcaaggatttgcaccttgcatgaactaagtaatttttgctataggtttcttaagctaaggcttacgctccttgaccatattagttcttacctccaatgcgtctacctattccgccacgagtgttggatatgatgcgtctcatatcagaccaacgataagatacaatgcctctttctcggcaaattatatatttttaaattgcgattgatttatgattaaagcataatgccttgccaaaaatatttacctgtagccacgatgatacatatcgttttccgtccatgctatatttagtcatttcatgtttcataattaccagctcctatttcttattttcttgacaataacatcttaccacagaattccttgttttttgtccggtaaaaatccggtaaaaagtcagcaaaaagtttaattttatccggtaaaaagccgattttttaaatatccttgtcgataacagcctgaattccaactttttcaagaatttcatgtataaataatctccctttttgtgtccacttggtgtttacttttgttcctagacgtccattactatgaactatgctgaccgtttctgatttagtcaaacctaaattcatatgttttttgtataatatccactgcccaccaactttatgctgcacctgctcttcgtataatattttattgagcttatgtgcggtcaagtcatagtcagctgcaatttgcgtaacagttattaatccaggagattttaaaatctgatcataataactcacttttggttcatattcggctatagtttgtgttttcacttcattttctaacattaactgctcatttagttcagcttgttttgctgcaagtgtaagtgcttctgcgtaggttcctggaatataaaaagtttgcatttctttttcttctaacttgttgaacttttgtacaaataaagctgtaaactgaatgccttttgccccagttaatttattggctatcatttcacagcccatttttgtgatttcatagcacttataatctttcccggtgccagcttgataagtagattcactgaaaaaatcatcagaacgcagttttgcgttttgattgatatatctaatataagtttcgatatcacgtagtaaatcagagtgccttttttctaccatttcagcaacttcacgactgtttaatgtattatttttatctaatactgctaaattattcattgtgttccctcctcatttttcaactactatattaagctgataggctaggcgttcaattgcttttctcttttcttctttgtactgcgagtgacttacatgtatggccaacatagcttcataatcactattttcttcaatgaatttagttagtatcacttgcctactccgttcaggaagttggttgatgtgatgatcaatcaatttaacatatgcttttgcttcatttactgcatctacattccatattgcactttcttctgtcgtagaatggaattcattattaaatgatggtggcactatggtcaatgtagaagttaactttggcattcttctctcgccgagtctaactctcataattttatatttttctaaagctcttattacgtttctttttgttctaacattgttaatttgcggtagttcgaacagcgccatcacacgcaacccctccattgtggtataatgattttgtctaggaatcacattccacgccggagcggtcgctctggctttttttatatatttaattcttttacagcatccggacttaaaattattccatcaacgtggtatttacttataaacgttagccaaccgatttggtgagcttctgtgtgcatttctcgagataaacaaatcagtcttgatttactgtgatcataatttcttctatctctaccttggccaatggcatctacatgatgtatttcgcctctatgacctgttacagcgcattttctgtatttgatacataagaacaggtatctattgatatcatccgtcatttgcagtcctggcgatgataacggtatatcaaattgaaaacaaaactctataatggaacttatgaagtcacgggcttgtattttcgataatttcgctgtactgaaatcacccggtaaattcgcttcaactgcatacgccacttttaaagtttctttgacaacttgacaatcattgctgaaactcctcggctttgtagcttcaaaatcgttataggtgtgctttactatgtcactaatcaaagcatgaatcattttgttttgtcttaatgttcgcctttcttgcatatacattctgtcaccatctttcaataactatttcaaaactttggtataataaaaataaaaaggtggaactgataatgacaatatctgattggatacaaatcttaagcattattgctacgttaattatttctatcgtatcaatcgtaattgcttcaaaatctttaaagttaacaaaaacatcaatagaaagtgctaatcgtccctatgttacatgttatttagatatggttactgttggtcatttccagaaatacttaatcattaaaaattttgggtcatcgccagcaattatcaaagacataagttttattggagaacccgcttttaaaaatagggctgacttagactcattgaatgaaacaacaatagctcccaaccaaaaatttattattctctttgacaaaaaagcacctgacaaatccataatatcggttattattagttaccaagatttacttgggaatttttataaagaagtatttcaattaaatccaaatttctctaaagatatagtatacgcgtcagcaagaaactcaaaagatagtgaagaaagttatattcttaaaaatactcttcatgaatatactaaaagcaatctttaatatacgattatttgtattactgcgacatgtattactcatatgtcgcagttttttgaaaatattacttttcatatatcttt

SEQ ID NO: 9 - DNA, 684707 bp, Listeria innocua
  misc_feature (1)..(end): n can be any nucleotide: a, g, c or t/u
cagggaatggttaatttgtttgcaagggctgtttcaggttcttttaaaccatttctgaaattaatacaatttcttttctttgggcttttaaagctttatatcgcgttctaaatttgctctttcagccaaaaattcgttgtatttttttgataaaataacttgtttagcttctgacttagcaaaacgatcttttaaatatttttctgcggcacttgaaccgtctagcgccggcgctacatgtccttttacgttcgtttcccaaaaatctaactcaaaagcaattatttgattgattaactcgtcatcgcgttcaatttctttccaaataaatttatttcctccaattagaacagctacataggctttgcttttacctgtgaccgctaaatagtgttgtatttgcactagataagtcgctggtacttcgtcagcttcccattcctttgctaagtatgctgatgctgttttacattccaaaatagcgtcttcaccaaccacaaacctatcaacgtttgccaacataaaatcatgctctggatgttgatacatcatgttgctacgtcttactttcttgccagttcgcttttcgaattcttttgcgacaacttcttccatttgattgccccagtatgcggcttctcccgctgattcatctggtaaaacttggtctgtcttatctagccacagctcaaatgctgttttgtactgatttaaccccatgatgattcccgcatcgcttccgccaatgcctaggcgccgagtcagcaaccattgcgttctatccatgtctttcacgcttgctaaaatgttcattgtcttttcttttgcaatagccatatatgttacctccattgattttttaatggacctgaggtataattttgttaaggtaatatctcaaatctcggacctgcgctgctacgcgggtcttttttaatgcctaaaaccatcgtcccaaagatcatcaaccacaagtggattctcaaccatgtttatcacttcctctcagccaaaaacctgcgattacagacataaacgacacgaaaatcattaccataaatacatccattatcttgtgacctcctcataaccctttagttttaactcttcgatatagtccgtcattttctcgcatcctgtttcaattaaagctatcttctgtctgaaagccggattagctatcattttcgttctgtcgtctatgaaaatctcgctattcccgaaaatcgtttgcttacgaaaaattcgctctgccattgttgtagcctcctaaattaaaattagaattaaaatcaaattacataagtttattaacgctaatgccgccgctactattactaagatgctgaacaaaagttggttcttcatattgcgcgcctcgggataataatttcgcgtaaatgtccatttacaaactctttagtgacttcatattttttattaaatgcttcagctctttttttgcgctcagattcatcaatctttttaaatcgctcttttacaatattgtttatttctgtgaaattaatatccttcgactcgtagccttcataactagccgatactaaaacttcgctcatttcccgcaactccttaccagtccagatttttgataatattgatcacgtttgtttaaaacttgttgtaaatctatgttgaaagttcttgcaatacttgcgttcagagttaaagcagatgcaactacatctgttatttctgaaatagcttgtttagctgcttctcgttgtatcatgtcgccttttcttaaattgaacgtcatcgtctctaagccatttttcagcgtgtttatcgcttcttcaacttctagttcaaagcggttggttaaagaagcgtggtggttgtctaagccgtcaaataaaggtggtatcattccatttgaaaattcatgtgcgaataaatatgtgctttcaggttcgttgtagctatcaattaaatgttctgcttgttcaagtgaaactgtacgctttccttttaactgattacttattaatgctggcgttacataactatcaatcgctagctctttttgcgtgcgagtttctgctaaaacttgcatcgcggttggtgctgatattgatttttgaaacataatatctcaatccttttttgttatttttttagcgacaaattaacaacttatcgttatatactattgttagtcgctccccgtgactaagttgtctgtttgagcgtcgttgtggtaggcggcgctcaatttgctactaatgattgttctaaaaacttatttacaaagtacagttgacctttaccagtcacttttgctgtgatcgctgtatgtgccccacttgatctcataattgcagtttctttaatcttgaaaagtccaagctccatgcttttctgcgtcggacgattgtagtccgttcctcttcttgaaatgagatagccgttctggcgtaaccattcaaacaagcgcttttccccaatgtctacaccgttttgttggatcaacttagcaagatcacggattaaaatggttccctctgtatcgcttacagcgtctgcaaataatactttcgggcgttgcgcttctattttttgctcagcctctaatcgcttggacttttcttctttaaggttcgttgccagtctgattaaaaagtctggatcagtaattgccttctcgattgtgtcatctgtcatgtatgcgccgtgtttacgaatggacggtaagacttcatccattaaccaattttcaaatttttctgcacttggtaaatctgatcttagaactaatctataaacatcagattcgcttaataccagtgttcttcgtggtctacctaacgaatcgttcaccaatgattcagcaggttttttacaatgatccctcatagctttttgaggattggagtaacctaatattgatgcaacatcaatgcctacaaagaacggttcttcatcaagaattacagttcttactttgcttccttcaaaattgaagagttttaaatttgtcattttgttctcctttctgttcgccctttcacagtgatatagtttttgtgaagggaggtggaatatatgaaaaatcgtatgaatataatgtttaaaggcgtctctgacgaccagcctatggctctaatgggtgttgaaagtattacttctttcccggataacaaaagttttgatttaaatgatttttacttagaagctgataagacctacaaaatcacttatacgggttcaagtgagttgagaaatgactcatcaaaagtttttctgatgaagtcaaatgatgtcctgtatatcaagtttgctatttaataactgcttttaatgattccgctaatgccaataccatggcggaatcccctttatgaagagcgtctttaaaatttgattcaaaattttctaaaaccactaatttacattcaaggcgtttttgtttgattttttccatcgtgtcaaagtattccattattgagttcctcctcgtgtatgttgagatttctgatactctttcgaataatcttttaaaaatgcttctacttctaatccttcaacctcaattaaatctggatcgcattcaatcactagttttggctttcggtccgctgtcatatctaaattgattgatcgcaccccacgccctagcttccaatctcctagctgaatggcattatatgcagacccatcttctctttgactagttttgattgacaaagttaactcttcgttactcatgttctagcctcctattttcttttgcccaaatcgccgttagttttttccgataatctattaactaatgaattaatttctgaataaagttccggcaaaatacttaaatcactataattttctccagttatactcaattcaatggtaagtacagactcttttctatttctcttggttaggaaagagtttgtaaatgcaattttcttcattttctagcctcctattttcgcaaaatctttcgtttccgttttagcaacgtttttggtaaaaaaattcgatatattgcattttagtatctttgccaaaagaggcaacatttctgctttaattttatactctcctgtttcatattttaaatatgtggatgcattcttaaatcctaactttatagccatatctttttgagaaaatccaagagattctcttttttctctgatatattttaaatcaatttcaacttgcataaaatcacctccgtttctgtttcagcaatctttataaacttagtatacgttgctaaaatagaaatgtcaagttctattttagcaatttttgtatttctgttttagcaatgtgttatcttaatattattaaaagtaaaaggtggtaaatatgaaagtcaatgaaatgattatcaatcttagggaaaagagaaatatctctcaacgcgaattggctaatcgtatcgggattaataaaagcgtaatgaacagaatagaatctggcgaaagagatattagagctcacgagctagaagcaattgctaactatttcgatgtttctgcagattacttattaggacgttcaaaacaaaacgatattgctgatacaatcgcggctcatatagatcccaacgcaacagaagaggaaatggaggaaattctcgcttatatagaagaaaaaagaaaagaatatgctaatgaagaggaaatagatatcacggacatcgctgcaaagaaagatgctgacgtggcaaagtttgtagaagagaatccggacttcaaagcagttgctgcacgtgtcatggatgacgaagaggctgttaaagcggtcaaaacatttattgaatattatgagcaacaaaaaaagaagtaatgtgtaatttatttactactaaacctcttgacttgtaacttaattacttgttattgaagttaattattaacattgtgtgaaaacgtgatatattccacgaaaattatgtataatataggtgcaacgttgcaataaaaaacaacggggtataaatacatgaaaaaactagatgaactgaacatgcaacatgatgtagtgatactagaacacgaatttacttcttgttcattcacttttagaaaagaaattttcatagttattgatagtagattaagtcaaagcgataaattggaagacgtcgcaagacttttgaataaaatataactatgtaaccagtttgcggccgcagattggtacatataaaaagggagatggaataatgtattgtccgaattgcggtcatgcattagataacagggaaactgaatgtcctggctgtttagctccaataacttatcaaacaagcaacaacgaaaaagcgcaaaaagtcggcgcttttatggaagaatctggtaaattaatgtcaggatgtggttgtttaatgacattgttgataactattcctgtcatagtaattttaataattatgtttttataaaaaggagataacgggatgagtaagtatagttacttgttaaaaaaatggtggttttgggctcttgctatattatttttagttattttattttacagcttttgggtaataatatacttggtggcactagcttccttaatattcgggatagtaaaagttgttaaaaatgaaaacagacgaaaatacacaataatattgactatatccgctatatttctaatcaccttttcactaataagagttgtacagatgtataactatgttattaataatccagaagaaactacagcaaatgagcaaaaaaagaatactgtccaagatgagcaaacggaaaaacccgctcaagaagacgctgccgaggacgagcaagcagaagaacctgctcaagatgatgtatctacaccctctaaaattacatcagatagtatagagttatttaatgagtcaattgatcgcttgatttctgattcgagcggggtactaataaaagtggttccatttgaaaatgaatatgatatgttaattgcgtacgtatctcaagatttaaaatatcaagatgaagcaactaaacaaaaaaatgttgattatttaggaagcgaaatacagcaacgtgctctaggtacgctctttggtggagataacaatctaagaccaatggttgagttcagatataaagatgagacaaagatggctggaagtagtgcttttgataaaactaatatgaagctcaaaggaaaataaaatataaagggagaatgaaaatgaaaaaagggattgttttaggattaattttattacttagttttgttttgtatggatgcggagaacctgaactagatattagcaaggatcccggaaaaggatattatctacaatacaaaggaaccacttctgatgaggcaaagataactttaaaagatgaaagcggagaaacaaaaaaacttgatgtagagaaaaatagttttactgctctagtgcctagactaacttctaaggcaatctacactgtaatagctaaagataaagataaagagacagaaactaagttagtagttcctaaacaaaaaaaacttgtttcttatgaagatttaaaaggacagtttaattatatttatgaaactgaagacaagttatctatttctcttcctgattctataaacagtaatgaagaaataacaccgggatttaaaattatgtctgatggtaataacgtaatgtcaattttattaacatacagttctgaggataatattggtatcactgattataacgattttacctattcaattgctgctattatgatgtcgttagattcggaaaatagtttagataaagttcttgatgctttaaataacagtatggataatcaaaaggaaaataaagtcacagttaatgatattacttatcaattttctacaattaacgctggaacaacaaatataacaactttagagattttcccaaactaaagagagcctccgggcttttcttttttaccgaaaaaaagaacgtatgtgcgaaaggagaatgagaatgaaagcggctatctatataagagtatctacacaagaacaagtagaaaattattcaatacaagcacagactgaaaagctaacggctttatgtcgttctaaagattgggatgtgtacgatacgtttattgacggtggatatagcggttcaaacatgaatcgtccggcgctaaatgaaatgctaagtaaattacatgaaatagatgcagtagtcgtttatcgactagacagactctcccgctcgcaaaaagatactattacactaattgaagagtatttcttaaaaaataatgtagagtttgttagcttatcggaaacgttagatacttcaagcccgttcggtcgtgcaatgattggtatattatcagtattcgcacagctagagcgcgaaacaatccgagatcgaatggtaatgggtaaaattaagcgtattgaagcaggtcttccgttaacgactgcgaaaggtagaacattcggctatgatgttatagatacaaaattatacattaatgaagaagaagcaaaacagctacgattgatttatgatattttcgaagaagaacaaagtattacttttttacagaaaagactaaaaaaattaggctttaaagttagaacatataatcgctataacaactggctaactaatgatttgtattgtggttatgtttcatataaagataaagttcatgtaaaaggtattcacgagcctattatcagtgaagagcaattctatagagttcaagaaatattttctcgcatgggtaaaaatccaaatatgaataaagaatcagcttcattgttaaataatttggtagtatgcagtaaatgcgggttgggctttgtccatcggagaaaggacactgtatctcgcggaaagaaatatcattataggtattatagttgcaagacctataaacatactcatgaactcgaaaaatgcggaaacaaaatttggagagccgacaaactcgaagaattaatcattgatcgcgtaaataattatagtttcgcttctaggaatatagataaagaagacgaattagatagtttaaacgaaaaacttaaaatagaacatgcaaaaaagaagcggctgtttgatttatatataaatgggtcgtatgaagtttcagaacttgattctatgatgaacgatattgatgcgcaaattaattactatgaagctcaaatagaagcaaacgaggaattgaagaagaataaaaagatacaagaaaatttagcagatttagcaacagttgattttaactctttagagttcagagaaaagcaactttatttaaaatcactaattaataaaatttatatcgacggtgaacaagttactattgaatggctctagtagcttgtttatttagattgtttagtatctcgttatctctcgttggacgtaaagagggaacaaagcatctaataggtgtcactcataagccgcctattattattgaccctgttacttctacctatgtattccctactgtcgcgccaagttcaacagattgtatttggatttttccacagcatattaaggattatcatgcaattggatataaccatacgttgataaagttttctaatttacagacttttgaaattgatatgtcgttagcctcttttaataaccaaattgctagaacctccatgctacatatgaagttctcacaaaaaatgcgaacaatggagagcaatttcccttctatgaatatgttttttcctccagctacactcgccgctgaatccaggcgttattataacactatgctctctgaaaaagacgattcaaaagacccagaacaataaaattaaaaaccagatatacacattgtatatctggtttccttcttaaattatttcttattctcaatcgcatctgcaattcgttttaacattaataattcttcttctgaatatgtataaggcaattccagataccatttctcaagctctgggtttccaattaaaggaaaagcatttactgaatttttttcccgtaaacccgctacatcatctaataaaaaatctgttgtagtcccaagaatttctgctaatttagccaaaataaagattggcggtcggtggttatcattttcatatttactgatagttgaagctgtagttccaatttttgccgctaattgtttttgagttaatctatttttctttcgtaaatgaattaatttttctccaaattccaatacgcccacctctcttccttttcattatagcaatttttcaggaagaattcgagaaatcacataaaaagaaatcgcctttttaatttcaaaagacgattcctctctattatactgttggttttttgcgtaatactccgattaatgctgcacttattatagttccaatcacgattgcgataaggtagaaccatggttgagatactaagaagataacaaatacgcctccgtgtggtgctaatactttaatatttaaaaacataacaattgccccagttattgcacttcctgcgataaaacttggaatcattcgaagtggatctgctgctgcaaatgggatggcaccttctgtaatgaatgacgcgcctaaaatagagttcgttagccctgcatcacgttcttgtgcagtaaatttgtttctaaaaacaagagttgctacgaatgttgctagcggtggcaccataccagcagccattgtagccgccataatcgcgctaccacctgttgcaacgcttgctgcaagcgttccagttgcaaaaatgtaagccgctttgttaattggtccacctaagtcagcagccatcattgctcctaaaagtaaacctagaataaccgcatttgttccacttagactatttaagaagtcatttaaccatgtatttaatgcactcattggcacgtttaatagtaacatcaatagtccgacaattagtacagatagcaccggataaaatagtactactttaatgccatctaaagtttttggtaattttttcagcataactttaattaactcgactgcataaccagcaagaaaaccacctactaaagcgccaaggaaacccgctccaccgacagatgcaacaccacctgctacaaaaccggctacaagccctggtctatccgatatactgtatgcgatataacccgcgaacactggaagcataaatccgaatgcaacatcaccaatttgttttaataatgctggaatttcgttatatgatcctaattttgcaagttgatcttgtggtacacctagaatttgatcaagcataaatgcgattgcaattgcgatcccgccaccaattacaaatggtaacatatgagaaacgccgctcattaaatgtttataaatttgttgaccaatggaaaggccatctgtactttctgttgcttcgctacccgattctgctttataaacaggtgcattcccagagatagcttctttaataagctcttctggtttatgaattcctgctgcaactggttttgcaattaaatgttttccatcaaaacgaggcatatcaacttgtacatcagctgcgatgataactccatcagcctcagcaatttctttatcagttaaacgattttccacacctctagaaccatttgtttctactttaattcgaacgcctaatttgtttgctgtttcttgtaacttttctgcagccatataggtatgtgcaataccagttggacaagcagtaaccgcgacaacagttttgccagtatcattagaagatgtaggagcaacaactgtttcttctgcatcaccttgctcgttgttgaagagagtgattacatcgtctggtgtttttgcatcttttaacgattgaacaaatgctggatgaactaataatcttgaaagtgctgctaaagtttctaagtgagttgcatttgcaccatctggagccgcaatcataaagaacaaatgagcaggttgaccatctaaggagttataatctaatcctttttcacttttcgcaaagactacagttggttcattaactgcttttgtttttgcatgtggcattgcaattccttcgccaactccagtagagctttgggcttcacggttcattatcgcttctttaaaaagtacctcgtcattaattttcccgttgcttttaagtgaagcaatcatttcatcaatggcagcttcttttgttgtagcttgtaatgacataatcataacgtctttgctgagtaagtctgtaattctcattttagtgcctccctgttattttagttatcttcacttgcggtaataattcattaattaaatctttttctgctagatctgttgaaaatgctgttgcgcccccagttgcaacgcctgcagcaaatgatttaactggatccttagttttatcgaaagttccaacgaatccagcaatcattgaatcaccagctccaactgaatttttaagttctccttttaaggcatcagcgaaataaacatcttctcctgtaaaaagtagagctccgtcgccagccatggatacgattacatgttgtgcgcctaattctaggcatttctttccataaggaatgagatcttctacactatctaacttaacaccaaatagttctgccagttcgtggtgatttggtttaataaggattggacgatttggtaatgcatctagtagttcttgtccagtcgtatcaatcatgaagttagcttgtttttctttacagatttggattattttatcgtagaaatcatttcctagtgaaggtggtacacttccagatagaataacgatgtcaccagcagttaccttatccatcacttctaaaaattctttgatttctttttcagagattgctgggcctaaaccattaatttctgtttcttctccgtgttttagtttgatattaatacgagtatcgtcttttactattacaaagccagtttgtatgccttcatttttaagccagtctttgataaatccacctgtaaatccgcctaaaaaccctgtagcaaggctcggtacgttcaattgatttaaaactctgctgacattgatacctttgccaccaggtaatttataatcttgtttcatgcgattaagttcgccaagttttagttggtcgatttgcacaatataatcaattgaagggtttaaagtaattgtataaatcatttttctacctcgattattttagttttttggataaaggattttcttacttctgaaggaatatagtctgttacaatagtagcttcatctattgaaaacatttttgaaaaattaacttcattgaatttcgtatggtctgctacaacaaaaacgcgatcagcacgctctttggcagcacgttttacaaatgcttcttccatatctggtgtcgtatagccatgctccggatgcatagcgttagttccaataaaagctttgtcaaaatgataatttttaatattatccaaggcaactgcgccaataattgcttttgtatgcactttcattttgccacctaaaagataagcatcaatattttgacgaactagttcttcaatatgggttagtccatttgtaactacagtaatatttcgatttgctaagtgagtaattaattccagtgtcgtggagcctgcatctaaatagatacaatcattttcttccactaaactagcgcaatatgctgcgatttcttttttactttgaatgtttttgaatgatttctcattcatgcttggttcttggttatgagaaataacaagttttgcaccaccgtgtacacgttcgattaatccttgttcctctaattcgattaaatcacgacgaatagttgactccgaggtatctagcccttcaactaattcttgtaatttaataacaccaagcttttcaatactctccataataagttgttttcgctctgcatttaacattcttactcctccatccaaagttagtttatcatctttatctttcaaaatcaaccgttttcatccaaaaacattcatttataatcaaattcattcatattatatcatgagaaccgccgaaaaccttcaaaatagttcagatagttgttttcttatacactttttatttttagcagtatacttaattagaagcaatgttctatagaggaggaataaaaatgagtactgaaataacgtttgatcaattagaaagtttttccaaaaaatggcgtgaaaatcctgataagttggttttccaagctagcattatgaaaaatgggattaaagcagcaacagaaaatcctgtatcaaaagcaacagtacaaccggttttttctcatgaggttcatacagataaagtttccaaccaacagcaaagtggaagatgttggatgtttgcagcattaaatacgtttcgacataaattaaatgggacacttggtctaaaagattttgagttgtcgcagaactatactaacttttgggataaattagagaaagctaattattttttagagaacattattgaaacagcgaatgaagatgaggatagccgattagtttcatggttacttgatactcctcaacaagatggtggtcagtgggatatgcttgtttcgattattgaaaaatatggggttgtttcgaaatctgctatgcctgaaacttttcaaagtagtaagtctgcggatttaaatcacctattaaatgaaagacttcgcacggatgcagttattttgagaaaagctgttaaagagcagaaagatactgctggattgaaggaagaaatgcttgctgaagtttaccagcttttagttatgactctgggtgaaccgccgaaagtgtttgattttgaatatcgaaataaagacaatgagtttaaacaagatttacaaattacgcctaaagaattttataaacgctatgtagatatggatttgaaggattatatcccgcttatcaatgcgccaactaaagataaaccttttaatcaagcatttacagtcgattatttaggaaatattgtaaatgggacgcctattaagtatttgaatgtggaaatggatgtattaaaaaaagccaccgcagatcaaatcaaagacggtgagactgtttggttcggttgtgatgtaggtcagctttcagaacgaactactggtattatggatacagatattttcttgctaaatcaggcttttggatttaaaacagctatgacgaaagcagaacgcctcgattataaacacagtatgctcactcacgcgatggttctaactggggttaacattgttaataatgaagttaatcgttggaaagtggaaaatagttggggagaaaagattggtaacaatggatattttgttgctagtgatgcttggatggatgagtttacattccaagtggttgtccataaaaaatatttatctaaagaattgattgaagcatttagcaatgagccaattgcgctaaaaccttgggatccaatgggctcgcttgcactttaaattgtaaattctgagatgattttgattccattcatttgaaaaagagctgctgctacgccggtaccatcttttatttttccagagaaggtgccgtcgtaaatagcacagcttccacaagaaggacttttttccttcataattatttgagtaataccgagttctttcattttagtcaaagttaaactcgctccgtttttatattcttctgttacatctattccttgattatccattactttagcgcgacctagccagacgtctttaccatctccacctactatttcagctggatttcttggtatttccaaaccacctgcaacttcaggacaaaaaggaatcgcctctccgttttcaaccatttgttttattttggtaatttctttatctttcccgtcatatctacaggcaattcctgccaaacaagcgcttacggcaatcatttatattcctcctttatttttaaatttattttaacataaaaaagctgccaccacttaaaggcgacagctctattgattattagatattttgataagctacggcgatttgagtaccgattagtgcgttgtgttttactagttcgatatttgcttctaagctcttaccgtctgttagttcttttactttgccaagaaggaatggtgtaacgtcttttccgtggatgtggttttcttctgcttctttaagtgcagtttggataacatcgttaattactttttcatccattgcaaattcttctgggattgggtttgtgattacagcgccaccttcaatttttagatcccattttgctttaagggactcagcgataacttctggagcatctgcacgtaatgttaattctacatcgcttgaacgagtatagaatgctggaagtacgtctgtttggtaaccaattactggaacgccttttgtttctaagtattccattgttaagtttaagtctaagatagattttgctccagcacatactactgctacatttgttttcgctaactcttctaaatcagcagaaacgtccattgttgtttcggcaccgcggtgaactccgccgattccaccagttacaaagataccgatttctgctaattcagcacagatcatcgttgcagctactgttgttgctcctagttgttttgtagcaataaggtagccaatatcacgacgagaaacttttgctacattgctgctttttgcaaatagttctagttcttcatcagaaagaccgattttaattttaccgtcgattaaagcgattgttgcaggtaccgcgccgttatcacggataatttgttctacgtcacgagccatttcaacattttgtgggtaaggcatgccgtgagagatgattgtggattctaaggctacgatagcttttccttctgcttttgcttgttttacttcttcggataatgatagataatttttcatttgaattcctccagatctttttgtagttgggatgttgataaattttggcgaacagtgtattcagattcgagtgttcgcgcagcatttacgctccctgcttttaaaatttcttgtaaagattttccttctaaccatgcataaattaccgcagaacaaaatgcatctcctgctcctgtcacatctacaatgttttcaatgacaatagcgggttcaaagataatgccttctgcgttgtttgctgcaactgcacctttactgccatttgtaacgatgacatttttcacgcctaaatctagccatttttgtgcagctaagcgccagtcttcatcgttttcaatggtcatttctaggtgagtttctgattcgtctcggttgcatattagccaagtcacgtgatccaagcgttctggtaaatgagacattttaggtgaggaaacgggtaccaagactaatgggatggaattaatttcggcaaaactcccaaggtattctaatgtttcttttggacaatttaaatcggcaataatggcgctcgcttgacttagcaagccttcgtttttcgctagtacatctggggttaagtgatcgtatgcatccatgtccgctagtgcaacgagcaaatctccattgttttcgagtacggctgtataagaacctgttgcgatgcttggaaatgcagtgacataatctaagttcatatatgtattactggcatttttgacagcttcccagtcggagtctgttccacaagcagtgagtaatataacttcttttccaaggcgaccaaggttttcaccaacgttcctagcaactccgccagcactttgtgttgagcgcaccggattagatgtagctagctgggccttgtctttaatgtaaaacttccgatcgacgttcgctccacctatacaaacgatttgttttgcttcatttaaaatataggcttttcctaaaatgcgaccttttttaataaggccagaaataaggttcgctactgtcggtcttgataaatcaagtatatcagcaagttcttgttgagaaatgtaaggatttttacggatggaattgaaaattatctcttccttttcgttcattttcgctttattattctccacgatataatgcacctccattccaaacttttgttttaatttcaaacacatgtttattatatatgtaaatgctttcttttgcaatctaaaaaacgaaaatccacttcttttaggaagaaaattttcgtttatcgttatttattttgaaggataagcagctcgttttcagtcagtgggcggtattcaccgagttcaagagaatcatctagttgtaagttccccattgaaattcgttttaaatagctgactgttttcccgcgagcagcgaacattcttttcacttggtggaattttccttcttggatagttacttttatttcgttcggagtgataatttctaaatgagctggtttacaggtgtagccgtcatcgagagtgacgccagcactgaaggcttctacatcctctgctgtaacatcgccatcaattttagcataatatgttttatcaatatgctttttaggtgaaagtaaattgtgagcgagcgtgccatcattagttataataagtaatccttctgtgtctttgtccaaacgaccgaccggaaatggattagtgagagtgtcttcttgctcgagtaaatcaatgacggtttctgacagattatcctcggttgcactcacgacattttggggtttatgaagcataaaatatacgaattcttggtaaatgacaggagttccgtgaacagtaacttgatctttgtctggattcacttgggttttactgtctttttgaatcgttccatttacgacaactgccccggatttaagcagtggtttcacttctttacgactcccgaaacctgtgtgggacaataatttatctaagcgcatggtttagctccttttttcttttattgtaacaaaaaaacgaagatccttaaaggcgctccgttttctttctattatttgatgttgacggcttgtttattttttggtatttcaagacctaggttgcctcttaaggttgtggctggatattcgtttcggtacaatcctcgactttgcaaaagcggaataacttgctcgacaaatgtttcaaaagtacctgggatgtcagacgcgatgataaatccatctgccgcctcattttgaaaccaaatttcgattaaatcagctacttgttcttttgttcctataaaaggtgttttcggggtggctgcttcggtcgctacttggcgcagggttagattgcgctcttttgcttcttttttgattcgatccgtcgtactttgaaaagcatttttaccgatatcgccaaggtcggggaaaggttcatctagttcaaattggcttaaatcataatcatcgaaataacgcgcgagataggtgacggcattttcaatcggaataagattggcaaattcagtgtatttctgctcggcttcttctagagtatccgctacaattgggctaatgcctgggaaaatcctgatctctgctgcatttctgccagctttttcagcacgagttttcacatcttgatagaattgaatagcttcttcaagcgaatctgaatgcgtaaaaatagcttccgcgttttgggctgcaaaatcccgacctgtgctagatgcccccgcttggaaaacgactggttctccttgtttggagcggccgatatttaacggtccttccacttgaaaatactcaccttgatggttcaaacgatgtaatttttctggattaaaaaattcgccggtttctttattataggtaaaagcatcttcttcccatgaattccatagtccgcgaaccacctttaaatgttctgccgcaatgctatatcggtcactgtgggttgggagatttttcttgctatgatttcgtgctgctccttcttgcggagaagtgaccaaattccagccagctcgaccaccactaatatgatctaatgaggaaagttgccttgcgagcgtgaatggttccgtaaatgatgtcgaaaatgttccaactagaccgatattttctgtagactctgctaaagcggataaaatagtaatcggctcaaaacgattaagaaaatgcggaatagatttttcagaaataaaaagaccatcagcaataaatacaaaactaaataggccttgttctgcaatttttgcacgagttttataaaaatctaaatctgtacttgctgctgggttaatatctgggtggcgccaaccatctgttgtgccgccaacgccgtgaatgattgcgccaaactggattgtatcttttctagtcattttacttcctccttttgtagtaaagctttttctaagtattcgataccgatttcagttactgcttggtaagtccctttttctatgtcaccaatttctactactggaacgtggcgaataccgtatttggcttgcagtacttctcgtaagtaatcatgatctgtgacgtcaatatcttggaagacaatattttgctcggttaaataatctttcacatctttacagtagtgacaccctactttactccaaacaacgacattagccatggacaacttcctcctttattgattcacttaataattggtacgaatagcgtttgatttccgcggatttgacaggtgttaaaacgacaaaatcttgaatattatatttttttgaaagtctggtaatttcttctccaacgtcttgtttcgtcccagttattgctccaattttttgcgtaataaatcgatatggttggctgatgtttttcacgtaggcttctgcttgttcacgtgaaccgacattgactctccgcccgtccgaaagctctactttaattgattctcgctctggaatatgacggtctgcagcagcttttgtttcagctacaacaacaattggcgctaattgaaaacttgcttgttggttaatttgatactgctcaaatatatcccgcgcttcttttaaaacttcctcttcgccgttaataaaataagcaaacacaaaagaaattcccagttcggcagcttgtcttgcacttgctacacttccgccaagtaaaaagatttccggattattttctggtagtggttttgcttcgactttggaagcagatttccgtgtgacaaaatcgactaattctatcagtttagcatcaaacgtttgaataggctttgcaaagtctttctgaagggcatcggtcgctggttgaaatccgccgggcgctttgccgacaccaagggaaatccgtcctggcgctaagttttcaagcacgtgaaattgttcagcaactttatatggactataatgttgcagcattacgccaccggatgcgagcttaatagtagttgtttttgccgcaatatatcctaaaagaacttccggcgcagctccggctatttcgtctgaattatgatgttcagcaacccaaaaacgataaaagccaagttgttctgcaagctctgcaagttctacagtgttttgtaaagcctcactaggacgttcgccgggattaataatactttgatccaaaatgctaagtcgaatagtcatatgacacgctcctttttcacttctttgatttcatataagtaatcggccgaaactcggtgtaaaaagcgttttgttcgttcttcttttgtgtgattaaatacttcatctggcgtgccttgttcgacaatgagccctccgtccataaagacgacttgatctgcgacgcgttttgcaaactccatttcatgtgtgacgacaatcattgttgcaccggcacgagcaatttctaacattacttctaaaacttcaccgacaagttccggatcaagcgctgcggttggttcatcaaataaaattacatctggattaatcgcgagcgcacgtgcaatgccaacgcgctgtttttgtccgcctgagagttgggaaggatatgcgctaaacttatcggctagccctacctttgttagctcccgctcagcaatctcccgcgcaatttttttcgggatttttctagcaacagtgagtccttccattacattttgaatgacagttttatgggaaaatagattgtattgttgaaagaccattgcggtattttttcgtaattgtaatacttcttttttggaaggtttcttgcagttaattatttggtcatgcattgaaatttcaccgttttcaggacgttccagtaagtttaagcaacgtaaaaaagtggttttccctgagccacttggaccaagaatcgtcactacttctcctttttttacggttaaatctattccttttaaaacttgattttgtccaaagcttttttgaatatttttaatggtaatcatactgtccctccttgatatttagcgatattcttttccaaaatataattaattgcttctattagaatagttaagaaccaataaatcagtgctgcaccaatgaatgcttcgagaaaagcgtaattatcagaagctacaatcgtggccattccagtgatttctgggaccgcgacgatagctgcaatcgaagttgtatgcaaaaacccgatgcataaattagtaaaattcggtagcgaagtcataaacgcttgaggtaacagcactttacgaatcgcttggccatgcgtatatcccatagaataagctgcttccatttgtccaatatcaacagcaataataccagaccgtaaaatctccgttaggtaagctcccgccgtgaaggataacgcgattatcacaaacaccacaaccgggattttatttgctgatatgcttaaatcaagcgacttacttaaaaaatcgacaatgagcggaattcctaaataaatcagcattatatgtaaaatcgctggtgtgcttcgaaaaaaagatacgtaaaacttggcaattggttccaaaaaacggacatggtacatccggatgagcgttagtaaaatagcgattataaaaccgaacaatatcggaaagaatgtcatcgcaagtgttaatggtatcgtttttagcatcgccaatacggctgttccaataaaaggcacatcaagcggcatcatcatctctcctttaaagttctatatcaaaaatactggtaaatctggtattctcttttttaactcgtttttcaatccatttgaaagaatattcaagtagcactgcggtaatatagtaaataatagacaacgaaatataaacttcaagggcgtgattgctcagcgtaattaaggtttggcctctacctgacatatccatcacacctatcgaaaaagctagcgaagtatctttcaaatacccaattactaaattcccaaaattcggcaatgcttgataaagtgcttgaggcaaaatgattcgtaaaaatgtttggcgtccgttcagcccgacactataagctgcctccgcttggccagcatctacactatttacaccagcccgaatcacctctgcaatggtcgccgcactacttaatgcatacgttgcaatggcggcataaagtggatccatttgcgataaatcaatcccaaatacgccagaaagtgctggaattccgtaaaaaacaataaataattgcaccataatcggtgttccgcgaaaaaaagaaatatatacgcgagcaaattgatttaaaacagggatctgataaattcttggtaatgataaaataacccctaatataaaaccgaaaataagcgagagtgccaagatatataacgtaataggtagataacccgctaacgtcggaataaaatcagcaatcattttcacatcaaacgctttatccatttaaatggcaccccctattttttaatactgttcttttgaataatctgcaccaagccatttttcactcaacttttttaatgtcccgtcatcaataatggattgaagtgctttatctacgtctttactcagttccgttttatttttaccaagcatgaaatatacctttgcatttgataaaacatcgcctactactttttctttgatggggcttgttttattttggaaatctactgcaaaaggtgtggaaatcgttgcatcagcgcgacctgtttttagttggttggctgcatcattagaaccttgtccttcataagcgatttcaaaattattgccttgttcttcattgattttctttaaaacgagtgcgccatttgacgtcgcacttgtaataacacgttttccagctaaatcttttgtgccatttatgctgttattactatctaatacggttaactgtaatgggaaattattataggctacatcgttaaataaaaatttcttctcgcgttctttacttttttccatttgatgcgctacaatatccacttttccggcaccaagactaacgagtaaattggaaaaatccatcgttttaaacttgaatttatagcctggtaaacgtttgtcaatttctttcactagttcaacgtcataacctgttaatttgccattttcatctaaaaagcaaacattaggaaactgcgtgcctgtcccgaccgtaatcgtttgaacttttttattagctgcttctggttcatctttcgctccgcatgcgcttaatgttaacgcggctacaagagccagtgccaaaactccatatttctttttcattctttctcccccttttttatgtccagctaggtattccgagtaatgtggcatcgaatttttccggaattaaaattttccgcatcatcacgccgacatcgccgtcctcttcatgttcaaaataaacttcatagccgcggcgcaagtacatatcaagtagccacggatgttttcttgcagaagtaccaagcgtaagtgccggagctttaagtgtatcgcgaagtacccgttcttctacatacgttaataatttatcaccaatcccttgtcccgctaattctggtgctgttgcaaaccaccaaacaaatggatatttagaaggaggcgaactactctcccacggaaaacgaacagtaattgtagaaattaatttaccattccgctctaaaacaaaagccgaagaattaacgatattttcggtaaccatcgctaaatctgcattagtagaaggccaatcgattcccagttctttcacggacttaaaagcactcgataacaattccaaaaactccggcgcatcttccacagtcgccactctaaaaatatcttctgccattttctattcgcctccttaaacttccactgaattttgatttaataacgaaatgaactgatttaatgcactatccagtcgttctttcgccgtaatttcaatttcataaagcccgttaccaagccgttcaatttgcttatcgaccgtaaactgacctttcaaaattatttcagcccctagctcttttaaaactggatctagcgcgtattgcagtgcaagtaaatgtccatttgatccgccaagccctagcggtaaaactactttcccttttaaagccttaagcggcaaaagatctaaataagcttttaacacgcctgaatatgcggctttaaaaatgggtgttgcgataataacgccagagctggactcaatttcactatttgctaaatgaatatcaggatgcgtgaaatcggcagttactaaagcctctgcttggattttgtgcacttcgatgattttaacttccgtaccattattcgctaattgatttgctgctagttgaattaaaccgttcagccgagattccgttttgattcccccagcaataattgtcacttttcccatcaaatcgccccttttaattcccatcaacttacttggtttttagatattagctatactataaagtaaaagattctgtttggctaatcaaaaaaactaatagctaaccacagtaatactaatacttctgctctaatccgcattattcctatgaattttatcagattaataaattgcttctggctattttacggtgtatactgttagaaatatcaaaaaactccaatatgaagggggaattatattggaatttagaaccattaaaactttttatacggtagtaaatacgggaagttttcagcgggccgcagaagtattaaattattcgcagccgactatttcaatgcgaattaaacagctggaacaagatttggacgtgcaattatttgaacgggggaaaacattaaaactaacccacgctggtagattgttttatgaaagagcgggtcagctaatcgctcaatatgaagttttggatcacacaatatttgatttaaaaaatggcaatgccggccttattaaaataggaatctcagaacctagcgcgagcctcgtcttaccacaaattttaaaacaatttttaaccgattttccaaagctaatggtgaatgtttctgtggatgatgctaatacatgtagccaaaaactgattgatggggaaattgattttgccatttgcggggaacccgagctgattttggagaatttttattttccgtttttccatgatacgcttgatttgattgtgtcagaaaaccatcctttagcttctcggacgtctgtagaattgcttgatttacgcgatgaatgctttattttcactccagcaaattgcccgattcgcatccaaattgagcaacatttaaaacgtgccattggtagtgattataaaaaaatggaactcactagtagcatgtctcataagtattttgtccgtgaaaacgttggtgtttctatctttacgagcaccgcacattccgaactcttagaaggaactgttcgtattccaattaaaaatttacctatttcacctccaattgggcttttaactaatcaaaaagaaaaagactttgatagtaccacgaaagaatttattgatcgaattatttattattttgatgataaaaaaagacagttagactaaataaatagtctaactgtcttttttcgttaaaattctaattgaaaacttgcttcaatcgcaaggagattatctcggtaaactttcatttccttcctcgtaatcgtccctttttcaaaataatgttgaattgtttcccgttcaatttgagaagctaaatcaattgttgtttgtagttcttcattatctgtttcttttttatgtttgccgctacctaatgctcgttcaaaattcattaaatataaggaaataacttcagggttaaattcgtttttatcgagctcatttagcttttgaacgacgaattgattattttcagtttgaagtttagctcgctcttttctacgttcttcaaaagaaagaggtactatgcgaaaatcacgaatactatgacttagaagctgacgatatctcattctcgcccgatatttttgagctcttgtttggacataaagtcgtttcccgagccgcatcataagcgacaacccaaccccagtgtcaattttccgctcaaatacgagtcttcttgtattttcaagttgccattcttgcgttaaacgtcgaagttctttctcagtagcactcacttctttatgttccattaacgaaaaaattctgccgttatacatttttagtacattattcatttctacttcattctcgtctgttttataacgttgtaattgaccgacaacatctcgtaatagcgcaattgcagtagtatgatcggctactacaacatcttttttagctgcaaaaagaggcagtgtgaagttagctaaaagtagtgtcgtaataattactccagcagcaataaaaattaataaatcacgttcaggaaaagcattgccctgacctaagacaaatggtaaggatagcgcactgactaacgtaatggttcctcgtacacctgctacagtatacaaaaacgtattttttagcctgctcactaaatctgcatggggattttcctcgtaattgcggaaaaacaaaatccataagaaccgaagcgcaagtagtaaaaacgttattccgaaaatatataggaacaacatgcttttatgtatccccgtatcttcccaaatagctgtcataatttgcggcagctgagtcccaagtaaaacaaacaccagaccattaagactaaaaataattactgaccaagtatttttagaaagcaaattgagttgcgccatttcaggattgatcctcttataactaaacgaatgcaccattcccccactgaccacagccaaaataccattgacgccaatattttctgccaccataaaaattaaaaaaggcagcaaaatttccattaacataaaagaagtcatgttttcaataccgagttggcgcagaccacgcattagcatgattttcagtaaactaagcaccactccaagcgcaatcccgcctagcgaaagcagcaaaaaactagttccagcagacataaaggagaatgttcccgtcacaagcgctaagactgcgaattgaaaggaaacaagtccagaagcatcattgataagcgattctccttctaaaatatgcataattttatgtggaacccttactttttccgctagtgctccaactgcgaccgcatcagttggcgctagtgctgcagcaagtgcaaatgcagccgcaaaaggtatcgctggaattaaataatgaataaaagctcctaaaaccccaaccgttacaaacactaggccaattgataatgataaaattgctttccgatttttccataacgattttttatccgtcctagccccgtcattaaaaagtatcggagccataaatagtaataaaaacaactcgggatttatatccatcgtatgatccccgagcggaatcgccaaaataatccctagtagtacttgaattaaaggtaccgcaatacttggcaaaaatcgacttaacacatttgataaaaaaactgcacttaacattaataaaatcagttcaaaaatctccattaatacatccctcgttcccgtttccgcgccttgctaattcgttctttagcaaggcatttgatccgttctcatactaacaaaaatatttttcgagaacatccgtctctgtatggagtttttcgcgtttacttacttttttttataaactacttgttcatttacaactgtcatcataacttctagatgacgaagattcgcaggttttattaggaaaggatcttctgctaaaatcgtaaaatccgctacaaatccaggtgcaatttgaccacgggaagtcgttttataacttgcaaatgctgccccttttgtataaagttcgattgcttcatatacggtaagtgactcttccggccaatatttcacaccattcaaatccgcattagccgttcttgtaacagctgcatggatcccccaaaacggattaggcacttcgatcggagcatcactacctccagctaatggaaagcctgctcgtaaaagcgaattccaagcaaaggcaagtggcggatgattttcaccaagcacatcgatagcccacgggagatcactagccataaactgtggctgtacatcaaataatatcggtaagccctccgcttctgctattagttcctttgtaagccaaggtgtgtgaattaatctatcatattgtccttctttaggtgggtttgctcgtaaagttcgaataacattagcaaaagcttggtcgcctaaaatatgaattgctacaggtaaacccgcttttcttgctgactgaactaaatcctcaaaagcctcatcggaatgaatttgtagtcctttttcattcgggttatcagcgtatcccgcactcattagcgccgtccgtgaaccaactgtaccgtcatagaaaattttcattgcacctaattctaaaaatttgtcgccactcataaaactttctttagacgttgaaaaattagctagttctgcatggtgaattaacaaatgtgcgcgaaatggcaatcgatttgctcccaccgtattccgaaaagcagcaaaagtagattcaaatcccgtaaaataatgtaagtcttccgaatgcgcgccggttatacctttagaccataaatcggttatcgcaatttttagccacgcgtttaattcagcaggtgtcgccgccgggaatgcatctatagcaagcgttgtcgcattatctcttaaaataccagtaaaattcccagctttatcacgaacaatttcaccaccgccatcaaaaccgttttccgaaaagttttcaatgtgcgcttttaaagccgaattaatcgacacactatggtaatcaatccgtctaactaaaattggattggttgtacttaccccatccaaatcaactaaagaaatcaatgtttgttcatctgaccatttattttcatcataaccttctacaaacaaccattcttcacttgcaagctgctttgttcgttcaagaataagcgctaatgcctcttttttagtagttgtttggtttaagttcaaccgttctaaagcttgtccgtaccatagcaaatggatatgcgcatcaacaaatcccggaaaaactactttaccttccaaatcgattgtttcatcaatttcagtagcatattgttttttgaggtccgctacttcacccaccgcatgaatttgaccattttttgttaatacagcagaaacttgctccccttctgctgtcatttgataaaatgtgccgttttcccataatttcattttctattccccctgattgatggaaattttcaaggcagctttttcttgttgatcctttttctgtaaaatttgttgtaaggtaatgctaactagcgcacatccgagtaaaataaatgcgccaatgaataaagctttgatgccgcctaaatgttgaactacaattgctcctaaaaatggcgcgagcatgcgagcggctgtagccattccgttcactaagccttgatataaaccggccgctccttttggtgcaagttgataagcaattgttgggattgctggccaagcaaacatttcgccgagtgttaagaaaatcatccctaacacaaaaccgctatatacgcttgcattcattgcgacaacaaaggataaaataaataagacaataccgatataaatttgtgccagtaagtattttttaaatctattaacaactggaattaaaactaattgccccagtacaataagagcgccgtttaaactccataaattaccgtattcgctagaagtcacaccttttatttccgtcatataagtagaaagattggactgccactgcacatgtggtaattggcagagtaagtatgtcagtaataatagcacaaaagaacataatgcgagcttcgttggaaattctcgtttagctccttttttacgatgttttgtttctacattaactttttcggatttccagtctattttgtagaagaaaaagaaaaaatagccagcaaatataattgcaaatacaaaagaaccaatatatacgtggctcattccttgttttgctagtagacctgcaagaagcggccctactgcaaccccgatattttgagcaacataaatcgcattaaaccctgttctcccaccagttggatgcgttaaccctgccgctgcgtaaagccctgagaataccattcccatcgcaataccaaccgcccataaattccaaataaagaacggaaatccgtggaagaaacataatgaagctgttgagagtactaatattatcgtaccaattgtaagtgaaataaagcctgaaaaacggtcaaaaataagtccaccgataatacttgaaataattcctacacctgaattaatcaacaataccaatgaagcatccgtggttgacatacccaactcttgcgtcatataaatcatattaaaaggccaaataaatgatagccctgtatatagtaacaccattccaataataacaatccataaatcctttggtaaccatttcgtcatttcctacactttcccttcttaaaaactaaccttttttaggttatcacaaccacgctctttcgaaaagaaaaagttcatcaaaaaaccacctagcaaattttgctggtggctaataagggactggcaataattccctatcatggttattctaagtgtactatgaattgcgtcatttgtctgtgaaaatgttagaaatattttaattatttttttctagtattaaatcatattctaagtttcttaaataagagtgaaattgagatacatttatttcaaaataatagcctaattcaaaaagaatatgtcgctctttcaattcatttaattgggcaatataggactctttgggaagtatttgcataatctcttgacgaaaatacccttgtgcgattttccaagaagtagtatgaagtctatccggcatttttttaatgaaccattggatacaatcctttgtttcccgtttcaaaaagttcatttctattgctgttagatcttccagcttcactttatccatatttttcactatatcagcaacatatgttaaaggaattttccaagcaacggtcttacataaggggtggatttttgtcttttctcgaataaaaccaagaacgcttcctttcccccaagaactatttttttctgcgtattgcgttacgctgccttcatcaatcgcgtaaacaaattcattattttcaggacaatcaataatatcatccttgttccaatacaccaattcagctacttcttgaaacttcggattactagtcaaagtaaaaatcaactccgtagtaaacattcccatcatttatcccgcctcctcaaaatcattgcgaaattgcaacttctttaatcataataaaaaaagagcgagagataagttcttaaagaaccatcttctcgcttcttatgtctattttgtgacagaattaccactccacttttaaaaatgttatatttttaacatttttatataaaacaggataaaaattagcattatttccggtgttctccttttctaataacccaccaaagggatagacaagtaattccttggaagacgaaaaacagtcctaaaataattccgattgcaatcgctactaatgtattcgtgaacaacgaaataacagcaataacaattcctaaaatccccattatgagcagtaaagtccagcccgggaaaccttttacggcaaaagcagttaaaattcgtaaaatcgctgaggctaatatccaaatggcaaagatgataataaaaatacgttcggccatattcgattcaaaaatagcaaaaccacctaccaagatcgataatatcccgtctagcataatccatttagaaatgctccaatatttacgttcgccaaagtaagaaataacttcattaattccatttagcactaaaataattccgataaaaattgttagcgcttgaagagaagtactcgggttaaacattaaataaatgccaagcccaatcattgctatgccgagaattaatacaaagtaagtatataatttcctcatatttccactcccttttaatggttagtaagtaaagatccggctgcctcatctataataaagacaacattcgggtgatttcgtaatatagaagccggacaatctacgctaatagggccttctaacaaccctttaaccgcctctgctttacgttcaccagaagctgttactaagatttgttttgcatccatcatatccgcaagtcccagtgtaagcatttgcgatggcgcttcatcttcggttagattgttatacatgatagtacttttaatagtagattcatcgctatctgctaaaaataagcgggcatcaaatggtgtaccaggctcatttgcaccaaggtgaccatttactccgagtcctaaaatttgtaaatcccgctcgttttcttccaaaattttcttgtaacgagcaatctcatccgtaaaatcatctaagcttccatctaataattctactctttttggcattttggttattaaatcataaaatttttgatgcatatatgtatagacggtaaaagatgcatctcttttagccacatattcatcaagattcattaaaaatactttttcaatcgggatttcaccagcgttaatttcttttacaagccctgcaaacattccatcgaaactcgctcctgtagttgtgttaatgactgggttgtcattttcagtaattacttgttttaccacttcgagagcttctcgtgacatttcttcatatgtttttgttttaattaatttcatcaaaaatcctcctccatactactcattacccaaacaatatattctaaatcaaaccatgtttttcgaagcttaaatataagccatcttcatcaaccgatttagtaacttcattagcaaggatttttaactcttctttagcatttcccatcgcaataccagtttcacaatacgtaagcatttctgcgtcattcatgccatcgccaatagccatggtatcttttttatccgcaccaatatgttctaacagaaactcaatcgctgttgctttatgaatatctggaaccatcaattcgccactgtcatctccaaaaattggaaccgtacaatgtaaaacttcaaatttaccactaaattctttttttaattcttcaaatggtacatctttattttctaaaaaacatgctttattaacatctgagcggtaaaggttcgtttcaccgtaagttaaactttccataaacggatgtgggttattaacttttttctcacgtgctattggatcattttccacatcgccgtaaactaaattatctaagtgggcttctaagttttcactagcaaacaatccaccatttgattccaaataaaaatctaaattcttttcgtggaaaaaatcaaccatatgaacgacatcagcatctgatacttttttatgataaatagtttcattgtctacttcgatataacccccaccagcaccaataattccatcaaatccaatggataaaattgattcataaagctctggtttggaccgaccagtacataaataaacttgatgcccattacttcttgcttttattattgcttctcttgccgattctggtacaagcccatcatcactcactagtgtgccatctacgtctacaaatactatttttttcgtcatgtaatacctcttttcgtctgttaatagtttaattatagcatttctttcataggaaggcgttcaattatataacaaaaaaacatcgaatagtaaaaactgtcaccattcgatgttttttattttattttaaaactggccaaaatgctttattttcaataatcatttcatccaacacttttttagctactgttgcatttggaactgattgattaagtgtaaatgcttgtaatgctttttgataagaattttcaaagtaagcatctacgagtaatttttctgctgcaacttgtgcttccattaagcccttatggaaatctccaatcgcaggtaaggcaatagcttctacaccggtcgccccaacataagctggtacttcaacaaccgcatcactgcgtaagtttggaatagaacctttattttcaactatcaacataaagcgacttttctcgtcatttaatagagacgtagcaatatcaacaatatataagccatgcacgccaaagtagaaatcaagcacatcttctttttctttattacggattttatcggccatttcttgagttttttgctcgcgaccgtccattactgtgttagcacgcgtatagtttggatctgcataatctacgtacatatccggatacaaataatattctaaataattatttggtaagttatctgggaagttttgcaccatgaagcgaatcatattaaatgcgcggttccaacttggatcttcttctttaatttcttgaacttttaatttctctaaaagctctggcataatatcacgtttcaatgatttatcataaatttttgtataccaaccaaagtgattcaaaccgtagtaagttgcaacccaattatcgcggtcatatccgtaatttttcgctagcgtgtcttcaataccaattgtcatatcacaaacattaatcattcgaatgcccgggaattgtctacgtaccgcttcagaaataattgtttccggattcgtataatttaaaatccaagcttctggagcgtatttttgaataaagccaactaattctaaaagtgggccaatgctgcgaagtccatatgaaaatccgccaagtccacatgtttcttggccgactaagccatgtttaagtgggattttctcatctttttcacgcattttaagtccaccaacacgaatttgtgagaagataaaattagcgccagtaaaggcttcttctgggtttgttgtctgaactagcttaatacttgaaaagccttgttgttctagcatatattgcagaattaaaaacatgttttcatttctagatgcttcaatatcgtataaacggatttcacttactggaagtctttcttgtccattaagcactgcttgaataattcctggcgtataagtacttccaccaccggcgatagtaataatttgtttttgcatgcctttcactccttaaaaacttactcattattgttataaatagtttgtaataactccacgcattcacgataagtgctacatttgcttatttgttctacatacgatttattagaagctattaacgataaaaaatcattaattaatggcgcttccgttccatctaattcttcaatcattggaatcataattagactaaccttgtgattatcccaggtaattggctttttcataatacaaataaaaataccacttttaatcgcaacatttttaattggatgaggtaaagcaatccctgttggtatagccgttgaaaataactgttcccggctaaataatttttctgtaaaactagttggtacatatcctttacttatacaatattcacttaaaaaatcaattgcattatatttctgatcatattcataattggtcaaaaataaatcttcatgtaaatatttctctttaatatatgcaaattttttcattttattagcttctattgttgccgaaagctgtttttttattgttacttcctcaattaaaccgatattgttggataagacaatacacgggacttccgcaggcaaatcaatttttttagtagaaatacacaaatcaacatctacattttctgatagtagtaattgacactgtgtattatcggtaatctctataacttctacgtttacgggtcgtagtacttctgctaattgctctcgtaagtaatacatcgcagctttaccttctagaacaatgaatgcaatccgtaccacttggttaagttgatgtttagcttctattttgcggtagtattggtataaatacattacgagtagaataatttcctcttgattgagaattactcctagacgttctaataacttttctccgatgaaaatggcaatatctagtaagtaactgtactgctgcgtgatgatatgcgtcacttgatttttaatgacaatacctcttttagccctctcaagtgcgataaaaatgtgttttgtcatatcgctagttacttctaaatcagttgtaaaatctatgagataaacgtgcttaatttcttcaagaattagtaaaatttcttggtaaagttcgccttctaaaaccattttcgtagtgacttgattttcaaaattgttcatcgcaacaattttttcatattcagtcaaaataaattgtttcatttcagcagaaatcccataacccgcttcctgctctatcgcatcaaagagctctcttaaaaacgggttatcgatttctgtaaccgttgattgttctggatgtttttttaagaagccactgctataaattatttgcgttagtaagattgtttcatcaaaatactttaaaacaatcttatgtttattgattatttttgataatatttggtggattttttcattattaatttctggaaaacaattggtgattaaaatcgtttttagcgactcatctagctttgcgatgcggtttaataattccattttcgtagttggtgtggcacttatagcataaataccgtcactagaatgaatgactacatctaaacctaataattgttcaaagtagcctcgcaaccactgaatatcacgttggatggtagattctgatgtatatgtttcggttgcatattcatatatgtctactccatcatctacaagtaatttcttaattaattgcgccatccggttttgttcaaatccagcttcttcctcaacgtcaaccggaaaaggtttttccatattataggcatatcctaactttttagaagtaaagataaagtcctctcctatattttctttaataacacgtatatcatttctaattgtccggtcacttatttggaatagatccgctaattttttcccaagcaaccaattattctcattatacagcgtgcttaaaatatttttttgacgttgattaagcatttttaatcacctatttcatttttttggaatatcatgataggaaattaattctacattattttcgtttaaaaactggcgcattctcggtgaaattaaactttctaattcattcgcgcgtggcgtagagaatgttgaattttccagaataaaagtatctagataaccaggatgtgtcatgatttcaacataatcataacacaaaatagaagctgcattgtcataaatatagtctaagttatcatattcaccgtacgggatttcaagcggcttttcccacataaattcgacatgttcaaaaccttttgtatcatgatttctaagtggtatcccaatttcttctgctagccttttcgcggcactcgtaacgactggataaatatctgttgaaaataaatggctatccaagtggcttggctttttcttcataaactccgtaaaacgatgatattgtgctttaaactcttggtaaacctcttcttcgttgtaaggatattcaggagtagtaaatttaggctttattaattcgccgtcttcattcactaaagttgctccatttgttagaggtttaccaagcgtcaaattaagatgcaagccaattccgagcgtaggtgttttttttgataaatctaccgcatgttcaaaagctggcatagtaaccattaacgttgtagaagttaatacacctaaattatgcgcatcaataattccataattgatagctcttgtgaacccaaagtcatctgcgttgataattagcttcatagcttttctctccttacttttcatctaaacgcttatacaaattaagcacggatttaactaagtcagagtatacaaaagcattcattagatgatcttgtgcgtgaatcagcagtaaagaaagttcttttgagctaccgtttgcttcttcttgaatcaaagacgtttgaacatgatgtgcttctcttaaagattgatttgcttgctcgatacatgcttctgcttctgcaaattcacttttttcagcgtgttgaacggcttttagaaacaaggaagacgcatctcctgcacttgatattattttaaaagattgtaattcagtgccttccattagtttccctccgtcgtaaatgtattcgttccagcttctttaatttttttaaatgcagcaataagaattggtactgcattcatattgccataatcttctttatcaattacttctacaggaacttttaacccgcgttctgttgtagcttctattacttgttcatatgccattgataattgcggtccgagtaaaacaatagacacgttatctaggtggtcagaatattcatctttcccccaagcttcaattgtaattcctttattcttaaacttttctgatgccgcaatagcctcttccatctttttcactaaaatggaggtggataatccgccaaaacatactaacataattttcatgtctatcgtcctttcatactaaaaatcaaaatcatctagactagcttcttggtccccgctattttcttgtacaagcgcttctttttcagcaattttaaagaatggatagtaaatgagcgctgaacaaatcaagataagtccaagtacaataatgtatctccagtcaaaagatgcaacaatggcaccgattggaactggtacatatggagaaaccatcgtaaatggattcataagacctagcttgattgagaaccaaccaattaatgctgcaatttgtggcgcaaccatcattggaataaagaatctcgggtttaaaacaatcggaacaccaaacattacaggttcattaatactgaaaaatgttggaattaatgccaatctaccaagcgtcttataacgtttagatttagaaaacatcataataacaacgagcgcgcctgttactcctgctcctgttaccccaacgatactccacataaagtctggagtgaaaataagcatggaagaaagtggctctccttttgcaagtgctgctgcattcgcgtctacgttttggaaagctacacttaaccaaaccggcgccattacagaatatccgtgaataccaaaccaccataataattgctggataaagataatcaacataattccaggtagcgtgtttacaagcgaagtcagtggtgagaataacgtttgaataagctcaactacgcgaataccgctaattgattcaaccccaaagcttaaaatcgctacgattaaaaccgagaataaaatcggccataaattttcaaaagatcgtaaaatcggcgttggaacaccctgacctaaattaatcgtgaatttcaatttatttttaaaaatgtgtagaatttctacagataataaactaattactaaagctacaaaaataccttcgccggcaagataagttacatcacttccgccagcttcaagtggtcttactgctactacaacaaaactcattaaggctgttacaatcgccccaatatcccacaaattgcgttcttttgcataataatatgctacgaaaatcgctacatagacagacatcaatccaaaggtagcaaaatgaatcggggaggtaatgttattaatatattcagcaacagcagcaatccaactaggtagttttgggattcctcctaattgctggaacaataccgggactgcaccaactaaagttattggaacaagtgccatcattccttgacgtattgccttcatctgggtgttactttctaatacttttgcaaatggtaatagccattttgacagaaatcgttctaatgctttcattaattttcatttcctttcactaagctgttatacgttcatgatagcgcatacaaaaatacctcacaattaatcttatttcctaagcataggaaatcctttttaatacaaaaaaatccctataaagtaattgctactttatagggatttcgctattttagttttctaatgccattaatttttgattatcatcaagtgctgattcatgtgcatcatggcgttttttcaagtgactcatggatagatatagtaaaccgatacatgcgatcatgatgattgtaagaacgagcattgacatactatatacatttggtcccatacccgctgccagtgactctctaaaggcataaattgagtaagtcattggtaggaacggatggattaagttgaagaaccatccagtaagtggcattgggaatgttccgcctgaacccgctaattgaacaatgagtaataccatcgcgataaatcgacctggattatcaaatgtcattgcaagaagcatgataaggaacatgtaagcaagagctgtaataatcgctgttccaaagaactcaacgatattatctggtcttaatcctaacgctatcatgatgccaccttctagaagcgccatcgcaactgctgctacaaaaccaagtgatagtttacttaaccaccatttgtaagctggttgaccttccattgaaacacgtctaattggcataatgaagttaaatacaagtgcgccaacgtataaagcaagtgacaacacatatggtgctaatgcgtgaccgtaattacttacgtgcgtatattcattatgtgcgagttttgttggagcagcaatcatgttaaatgttttgtctgttgcttttgtatctttcacttgttgcgcaccatctgctagtttgtctgttaattctgtgctaccgtctgttaatttagttagtccatcacctaattggaaggaaccgttcgctagtttagaagaaccatcagcaattttggaagagccgtctgctagttgtcctacacctgaaactagttttggtgagttagctgataattggtttaaacctcctgctaattggcttgaacctgcttgtagttgatttacgcctccagcaagtgttggaactttagcagctaattggtttgttccgccttgtaactcttttgcacctgaacgtaatgcgtctgaattgcttgcaagtttattacttccatcatttaactgacttaagccgttttccatatttgaactaccggcagcaagttgtcctacgcctgaagttaaagttgggatttggttgttaagttcatttgttcctgcaactaattttgcattgccggcttgagctgattttagtccagctgttaactggttcgcgccaccgagtaaagtttgactgcctgaaccattgattgcttgatggataccattaaatgcttctgtagttccaccatgaactgctttataaccagctgaaattttcgctacaccagtttgcaattcagttacttgtgtttgaattgccgctaaatcaagacctgataagccgctttgtagtttttctacagtcgctacttgagtggcagatttttgtgattctttgtctaaatcagcttgaattgcatcaataattttttgtttatcttccgcgctcacaccgtttgttgcattaatttttgctttaattgcttcggcatcgaagttcgcattggatttaataaaagttaaaccattttgtaaatcagttaagcttttttgaagagcttgtaattgttttgcgagtgctgcatcttcaccgtttacgttttgatttaattggtcgataccttgttgtaaatcattcataccttgttttaattgagctattttaccttggctattagttaaattaccatctagttcttttaatcctgctgaaagtttattactaccatcaactagtgaatttaagccagttgccaggcttttttgaccgtcgtttaattgcgttacaccagatgcaagagctggtacgctgccattcattttgtttaaaccatcagaaagggcagtagaaccattgtatgcttgattaattccaccagaaagtgtatctacgcctgatgtataagtcgaaactccgcttgataattttgttgctccaccatcaagtgcagccacaccgtctttaagtggtcctacaccagcagcaagcgttgaaacaccagcatttagtttatcgccaccagcggccgcagtattcacgccatctgtgtaagtttttaaaccaacttctaacgtattagcgccatctttgaacgttaaagagctatctgcgagcgtttttaaattagtagaaattgttttattaccttcttgtgatttcacgaggccatctttaatttttccagagccatcagcggcttgggcgaacccgtcaccagactctttaattttatcaaaaattgcttccgcgtatgattttgttacctcagcggaaacctcgcttttcagttgtttggctccttgttcactcacgacttgacctaaatagttaagcgagccgtttgttttataggataattccatttttttcggatctttatctaaaacggatgctgcatttttagagaaatcttttggaattgtgacaaccatataatatttgccatcttttaagccttgttcagcgtcttctttggaaaggaaattccaatcgagttctttgttgcttttcagtttggttactaactgatcgccaacatccattgtttgaccgttataatcaaccggtttgtcattgttaactaccgctactggtaaatcccctgttttgccgtacggatcccagacggattttaagaaaaagcttgcatataaaagtggaataaacagaataactacaaatgataaaagtagtattttgtttttaaataattttttccactcattttttaccatatccattttattaccgcacttctttcttttaaagatttattacgcttcgttccaatctatgatagtggttcgttctttcccaataacttgctctactaaaacagataatttttgtgagtataaataattagcgtattctttatcagcgtttctaaaagcacttgtaatggtgtgaataccggactcggcaaattcatgatagtcagagaaaacagtgtggattaagtcggaatctgggtatgtatcgattttcccttccactgcttctacaatgtccagcaaattaatttcttcagggtctttagcaagcgtgaaaccaccgttattacccgaaactgaattaatcagcccgctaacgactagcttcctcaaaattttactaatataagacggcgacgaatcacgcaatcggtgatgaatagttacggaagaaatgggaacatctaccttctgggtgtacaacatcgtcataatacaaaaaacctgatccatacttttgctcaacttcataataaaaatcctccctcttcccattattacctttcaatatccttaatggacattcaacatctatatacaatacacccattttttttaaagtgcaagagttttttactgaaaatggaaaaaaatttaatgaatgcgtttgccgtgaataaaacaaccgcaagtactgtctcaaaaattttccttagctaagaaaaaaactggaataattttcgaaaacaaacgtgctaatcttatacatgttccaacaaacaatgacttaggaggtgcttttctcgtgttaactgatgatgttccaaaaaaatcacatttaccattaattaagcatcattctaattatctgtagcttggtttagcagtgttcgcaaataaaatttatggaggtaatacacaatgtctaaacaagcaaagtctttaaccttattcggattttttgccattacggcttcgatggttatgacagtttatgaatatccaacatttgccacttccggctttcatctcgtatttttcttacttcttggcggatttttatggttcttacctgtcgctttatgtgcagcagaaatggcgacagttgatggatggcaagaaggcggtattttttcttgggtcggtaacacgctcggggaacgttttggttttgccgcaatcttctttcagtggtttcaaataacggtcggattcgtgacaatgatttactttattctcggtgcgctatcgtatgtatttgattttcccgcgctcgaatcgaacccttttattaaatttatcggtgttttaatcattttttggggccttactttttctcaactgggtggtacgaaaaacactgctaaaatcgcgaaatttggttttattatcggtattctcatcccagcaatcattttatttatcttaggtattgcttatgttgctggcggaaatccacttcatgtcactttttccaaagaggcgtttattccggatttctcaaaagcttcaacattagtcatcttcgtgtcatttattctcgcttacatgggtgttgaagcttccgcgagccacgtaaatgaaatgaccaatccaaaacgcgattatccactagcaatgattatgctcgttattttagccatcgcgctaaatacaatcggcggcttaacaatttccgctgtgttacctttaaaagatttatcacttagctccggcgtcgtgcaaacattccaagcattaattttacattttggttccagcttaggttgggcagtaaaactgattgccatcatgatcgcgctaggtgtcatgggtgaagtcagtgcatgggtagttggcccgtcacgcggaatgtatactgcagcagaacaaggcttacttcctgaaaaaatgaaaaaagtaaataaacacggagtccctgttccactaattatggttcaaggtgtcgtcgttactatttgggcagctattctcacatttggtggtggcggtaataatttatcattcctaactgcgatttccttaacagtggtcatttatttagtcggctatttactctttttcatcggctacttagtacttattttcaaaaaatcgagcttaaaacgtacctaccaaatccctggtggcaaaattgttaaagtgattgtggcactaatcggcttagtaacatctattttcgctttatgtatctcatttgttccaccagcatcaatcgccgcaaaaagcgatacgacatacatggtgatcttatcaatcagctttatcatcaccgtactaattccattcatcatctacgctgtgcacgataaaaaagacatctcaccgaaagatattactcatttagactcaagcgacatcaataaattcacccacccaagagctcgcggcgaacacattattaatcctgatgataaacatattatgaatcaagacaaattataggaggaaaaaatcatgttatatagtaaagaaaataaagaaagttatttagaaccagttttcggatcaagtgcagaggatcgtgatattcctaaatatacccttgcgaaagaacctctcgaacctcgaattgcttatcgtttagtaaaagacgaacttttagatgaaggttccgcccgtcaaaacctagcgaccttctgccaaacatatatggaagacgaagcaaccaaattaatgtccgaaaccttagaaaaaaatgcgattgataaatccgaatatccgcgaacagctgaacttgaaaatcgttgcgtcaatattatcgccgacttatggcatgcacctaaggaccaaaaattcatgggaacttccacaatcggctctagtgaagcgtgcatgctcggcggaatggcgatgaaatttgcttggagaaaacgcgccgaaaaacttggcttagatatttatgcgcaaaaaccaaacctcgttatctcatctggctaccaagtgtgttgggaaaaattctgtgtctactgggatatcgatatgcgtgttgttccaatggataaagaccacatgcaactcaataccgaccaagtgcttgattacgtagacgaatatacaatcggcgttgtcggcatcctcggcattacttatacaggccgctacgacgacatctacgcacttaacgaaaaattagaagaatataatagcaaaacagattataaagtctacattcacgtcgatgcagcaagtggcggattcttcacaccatttgtcgaacccgatatcatctgggacttccgcttgaaaaacgttatctccattaatacttctggtcacaaatacggcctcgtttatccaggtatcggttgggtcctttggaaagatgaaagctacctaccagaagaactcatttttaaagtcagctaccttggcggagaaatgccaaccatgcaaatcaatttctctcgtagcgccagccacatcatcggtcaatactacaatttcttacgctacggcttcgaaggctaccgcaccattcaccaaaaaacaagcgatgtcgcacaataccttgcccacgcagtcgaacaaaccggctacttcgacatttataacgacggctcccatttaccaatcgtctgctataaattaaaagacgatgctaacgtaaaatggacattatatgatttagcggaccgcctccaaatgcgcggctggcaagttcccgcatacccactaccaaaaaacttagaaaacatcatcatccaacgttacgtctgccgcgctgacctcggtttcaacatggcagaagaattcatccaagatttccaagcctctattcaagaactaaacaacgcccacattctcttccacgatacccaacaatccggcgtccacggcttcacacattaataaaaaggctagcctctcaaataggctagccttttttcatgttcttttcttctaagcaactgaatcgcattttccacatctattaaatcccggtcaaaaaaagccagcgaaaccggaataacagtctcttgcaccgcctctttcaattccatttcgcagttcgggtgacaaagcacaatcgtcggctcatctatttccgccaaaacctcatttaactccctcgtcgaattaaacatcgtctcatgcaccttcaccttccgcccaagttcctgctccacctgaaacttacatgactcaaaattaatcaaattaaacgagaaaatacagatttgcactggattattccatttataaataagcggatataagtgaatcgtcaaataattaatatgcgagtcaattaacattgcacgatgcccactgatttcattccaacgctcaagcacacttttcacaaccaaataaagcggctgatattttttatccaacaaccgttcattactcggaataagaccttgcaaattaaataacgtcttcttcaaaaaataacaaagcgctgcccgaaataacgagtgattaaccacttctgacccaaaatattcctcaaacaaatctattaaagactgtaaatcagcatttttcaatatcaattcattaaattgctccaattccacctttttcatagaagcatcaataatactgaaattagtcgaataataaatcaacattaaatacaaataatcattatacgaaaataccaagtcaagctctttttccagcgtttctttacaacttttgcgaaccataacaagaaatcttgaagactcaatatatttctggcactgttcatccaaaataatcgcactcgtcggaatatcccttttaaaaaccatcgaaataagcgacctaaaatactcgtgaccttccgcattatgcgctactgcatcaatattaatccgtaaattcaaagtagccataaaatcatcaatcattttcttttcatgatccagtaacggataaatacgaacaccatattctgcttgaagaagcgcaatcaaatatcgaacccggtactcctttccagtaatccgattattttcaagtgataaatcaatatccctcaaaaactcctccaccttatgtttcaaccgatatgcatgcgaatgagaaataaaatattcatccataaaatcggtaaacttatgctcctccacattcgtaacaaaaaacgccaagcacttcaaaaacatcgagttatcataaagcttatataaaacttgccgctcacttgctccgtattgtagctggcactgataaatccaatcatctgcattttctttcacctgaatactaatcaagccatccaattcttcatttaacctatgaatatccgatcgcaccgtcacacgcgaagtccccatatattccgccatttcatctaaattcgtatgtttattcttcagcaagaaatcacatatcaaacattttctcttgatatccttttcaatataattcgtaagcataactaccctctccatggacgattaataaacaataacttttccaacatttttcatgttaaaacaatcacaaaataatgtcaaagaaataatcattctcttttgatgaataaatattatcatttttatttgcattctacttctacagatagaaaaacatcaacgtaaatttacgttgatgttttatcaataccggcggccggggtcgaaccggcacgcccttgcgggcacaggattttgagtccagcgcgtctgccaattccgccacgccggcgtaacaatatattaaattataactttaaaacattaattatgcaaatggaggcgccaaccggatttgaaccggtgataaaggttttgcagacctctgccttaccacttggctatggcgccgcacaatattcaactaaaaagcggaagacggggttcgaacccgcgacccccaccttggcaaggtgatgttctaccgctgaactacttccgcattaactgggccagctggattcgaaccaacgcatgacggagtcaaagtccgttgccttaccgcttggctatggcccaacaattataatagttttataaaaacaaaaagggcggatgatgggaatcgaacccacgaatgcctgaaccacaatcaggtgcgttaaccacttcgccacatccgccattattttatatatggcaggggcagtaggaatcgaacccacactggaggttttggagacctcagttctacctttaaactatgcccctataataatggtggaggggagtggattcgaaccaccgaacccgaaggagcggatttacagtccgccgcgtttagccacttcgctacccctccatattaaataaaagaaaaaaagtggcttgggacagaatcgaactgccgacaccttgagcttcaatcaagtgctctaccaactgagctaccaagccataatggcggtcccgacgggatttgaacccgcgatctcctgcgtgacaggcaggcatgttaacccctacaccacggaaccactctattgcgggggcaggatttgaacctacgaccttcgggttatgagcccgacgagctaccagactgctccaccccgcgacaatattattataaaactaatggtggaggttaacgggatcgaaccgctgaccctctgcttgtaaggcagatgctctcccagctgagctaaacctccataattactattctactctaaaaacatgaaattgtctctaatagattagtaaaaaatgacccgtacgggaatcgaacccgtgttaccgccgtgaaagggcggtgtcttaaccgcttgaccaacggaccttagtaagaaaaatgttgctttattattacgtgtaaacggagagcaagggattcgaacccttgagacagcttacaccgcctacacggtttccaaccgtgctccttcggccactcggacagctctccagaaaatggctccacaggcaggactcgaacctgcgaccgatcggttaacagccgattgctctaccaactgagctactgtggaataataaattgcccggcagcgacctactctcgcagggggaagcccccaactaccattggcgcagagaagcttaactaccgtgttcgggatgggaacgggtgtgaccttctcgccataactaccagacaatatgaagttgttgaaagattgctctctcaaaactagagaagaaagggttcagttaggtaactttgtttcattttttggttaagtcctcgatcgattagtatttgtccgctccatgtatcgctacacttccactccaaacctatctacctgatcatctttcagggatcttactttccgaagaaatgggaaatctcatcttgaggggggcttcacgcttagatgctttcagcgtttatccctgccacacatagctacccagcgatgctcctggcggaacaactggtacaccagcggtgtgtccatcccggtcctctcgtactaaggacagctcctctcaaatttcctgcgcccgcgacggatagggaccgaactgtctcacgacgttctgaacccagctcgcgtgccgctttaatgggcgaacagcccaacccttgggaccgactacagccccaggatgcgacgagccgacatcgaggtgccaaacctccccgtcgatgtggactcttgggggagataagcctgttatccccggggtagcttttatccgttgagcgatggcccttccatgcggaaccaccggatcactaagcccgactttcgtccctgctcgacttgtcagtctcgcagtcaagctcccttgtgcctttacactctgcgaatgatttccatccattctgagggaacctttgggcgcctccgttactctttaggaggcgaccgccccagtcaaactgcccacctgacactgtctccccacgcgcttagcgtggcgggttagaatggtcatacagccagggtagtatcccaccattgcctcctcgtatgctagcgcacacgtctcttcggctcctacctatcctgtacaagcggtacaaacattccatatcaggttgcagtaaagctccacggggtctttccgtcctgtcgcgggtaacctgcatcttcacaggtactataatttcaccgagtctctcgttgagacagtgcccagatcgttgcgcctttcgtgcgggtcggaacttacccgacaaggaatttcgctaccttaggaccgttatagttacggccgccgtttactggggcttcaattcgtaccttcgccgaagctaagcactcctcttaaccttccagcaccgggcaggcgtcagcccctatacgtcaccttacggttttgcagagacctgtgtttttgctaaacagtcgcctgggcctattcactgcggctctctcgggcttgcaccctaatagagcaccccttctcccgaagttacggggtcattttgccgagttccttaacgagagttctctcgctcaccttaggattctctcctcatctacctgtgtcggtttgcggtacgggcagtactactcttcctagaggcttttcttgacagcgtgaaatcaggaacttccgtacttaatttccttccccatcacagctcatgcttcgcaagaagcggatttgcctacttctcacactcactgcttggacgcacatttccattcgtgcgattccctatccttctgtgtcaccccatcggttaaacaattagcactggtacaggaatctctacctgttgtccatcgcctacgcctatcggcctcggcttaggtcccgactaaccctgagcggacgagccttcctcaggaaaccttagatattcggtggaagggattctcacccttctttcgctactcataccggcattctcacttctaagcgctccaccagtccttccggtctgacttcaccgcccttagaacgctctcctaccacgaacctccgaagaggttcatccacagtttcggtaatatgtttagccccggtacattttcggcgcggggtcactcgaccagtgagctattacgcactctttcaatggtggctgcttctaagccaacatcctggttgtctaagcaaccccacatccttttccacttaacatatatttggggaccttaactggtggtctgggctgtttccctttcgactacggatcttatcactcgcagtctgactcccgagtataagtacatggcattcggagtttatctgaattcggtaacccgagaagggcccctagtccaaacagtgctctacctccatgactctttacctcgaggctagccctaaagctatttcggagagaaccagctatctccaagttcgattggaatttctccgctacccacacctcatccccgcacttttcaacgtgcgtgggttcggacctccagtaagtattaccttaccttcatcctggacatgggtagatcacctggtttcgggtctacgacctgttacttatgcgccctattcagactcgctttcgctacggctccgctttttccgcttaaccttgcaacaaatcgtaactcgccggttcattctacaaaaggcacgctatcacccattaacgggctctaactacttgtaggcacacggtttcaggaactgtttcactccccttccggggtgcttttcacctttccctcacggtactggttcactatcggtcactagggagtatttagccttgggagatggtcctcccggattccgacggaatttcacgtgttccgccgtactcaggatccactctggagggaaagccatttcaactaccgggctgttaccgtctttggcgggcctttccagaccgcttcatttataactttcttttgtaactccgtatagagtgtcctacaaccccaagaagcaagcttcttggtttgggctctttccgtttcgctcgccgctactcaggaaatcgatttttctttctcttcctccaggtacttagatgtttcagttccctgggtctgccttcctcacgctatgtattcacgtaaggatactatccgactaaagatagtgggttcccccattcggaaatctctggatcaacgcttacgtacagctccccaaagcatatcggtgttagtcccgtccttcttcggctcctagtgccaaggcatccaccgtgcgccctttctaacttaaccaatttacttctacgaagtaaaggttgtttttctgatgttccgtatcagcgatgatacttcctatcagatgaaagattcactttcagatgattctcggttacttgtgtcataaataataaattatctatgctaactttactaactttcttatctagttttcaaagaacaattttggtggagcctagcgggatcgaaccgctgacctcctgcgtgcaaagcaggcgctctcccagctgagctaaggcccctaaaaggaattaaattggatgttttcttcgtgtcagaaagaaaaagtgggcctaaatggactcgaaccatcgacctcacgcttatcaggcgtgcgctctaaccagctgagctataggcccgtcaaaaatgtagtggcgctatgctccatgcatgttgccttgcgtactttatctgacatacaagagagtgacctctcaaaactgaacaaatagagaagaacgaaaactcacaggtttccttttccttagaaaggaggtgatccagccgcaccttccgatacggctaccttgttacgacttcaccccaattatctgtcccaccttcggcggctggctccataaaggttaccctaccgacttcgggtgttacaaactctcgtggtgtgacgggcggtgtgtacaaggcccgggaacgtattcaccgtggcatgctgatccacgattactagcgattccggcttcatgtaggcgagttgcagcctacaatccgaactgagaatggttttatgggattggctccacctcgcggcttcgcgaccctttgtaccatccattgtagcacgtgtgtagcccaggtcataaggggcatgatgatttgacgtcatccccaccttcctccggcttgcaccggcagtcactttagagtgcccaactaaatgctggcaactaaaatcaagggttgcgctcgttgcgggacttaacccaacatctcacgacacgagctgacgacaaccatgcaccacctgtcactttgtccccgaagggaaagctctgtctccagagtggtcaaaggatgtcaagacctggtaaggttcttcgcgttgcttcgaattaaaccacatgctccaccgcttgtgcgggcccccgtcaattcctttgagtttcaaccttgcggtcgtactccccaggcggagtgcttaatgcgttagctgcagcactaaggggcggaaaccccctaacacttagcactcatcgtttacggcgtggactaccagggtatctaatcctgtttgctccccacgctttcgcgcctcagcgtcagttacagaccagagagtcgccttcgccactggtgttcctccacatatctacgcatttcaccgctacacgtggaattccactctcctcttctgcactccagtcttccagtttccaatgaccctccccggttaagccgggggctttcacatcagacttaaaagaccgcctgcgcgcgctttacgcccaataaatccggacaacgcttgccacctacgtattaccgcggctgctggcacgtagttagccgtggctttctggttagataccgtcaagggacaagcagttactcttatccttgttcttctctaacaacagtactttacgatccgaaaaccttcttcatacacgcggcgttgctccgtcagactttcgtccattgcggaagattccctactgctgcctcccgtaggagtctgggccgtgtctcagtcccagtgtggccgatcaccctctcaggtcggctatgcatcgttgccttggtaggccattaccctaccaactagctaatgcaccgcgggcccatctgtaagcgatagccgaaaccatctttcaagagcgtggcatgcgccacactctatcattcggtattagccccggtttcccggagttatccccaacttacaggcaggttgcccacgtgttactcacccgtccgccactaactttggaagagcaagctcttcctccgttcgttcgacttgcatgtattaggcacgccgccagcgttcgtcctgagccaggatcaaactctctttaaaatataaattgaatttgaatacttattcaacaccgtgaataagattccttgcgtcaaattgacttcgctagcaattaaattactagtttgtttttgttgaaaacagctttctgttttctgccctgcgattaccagtgagactttacgtctcattgcttttcgtcttcttttttgttcagttttcaaaggtcagtttcttttgctgctaaagcgtttgtccgtatcagcaacgtttataaatataccaagatttttgcctttcgtcaatactttttacaaagttttttaaataaagatgaaaaaagattaatttagtgtataaattgatgttaggacaatgttttttagtcaaaactaaaaggctttatgttgtataaatttgcattcctttttcttcaaattgttctttcaagactggatctatttcttttccagtgatgatagaagatatttcatctagagctgcgtatttgtataaggagatccgaccgaacttggtgtgatctgttactaagattacttcatcggctgagtggagcatttgttgttttgctgggattagatattcatcgtagtgcattaaccctttatcaatatcaagagctggtgtggttacgaaggctttatgtacgtgaatactctgtaaggttccgctcgttatcataccgttaagaatgaatgtttccggataaatgactccacctgtcacgattactttggacggggaaaagcgcattatggaagctacgttaatatcatttgttattacggttaatttggagcggtcttttaacgctgttgcgatatgaccggttgttgttccggcgtctaggatgattgtgtccccgtctttaaccattgttgctgctaatgtagcgatgcgttgtttttcttcatagcgcacttcactacgttttttccagttaggttcagaaactactttttcttctatcataactccgccatgggttctttttagttttttgtctttttcaagtgatgttaaatcgcggcgaatggttgcttcgtgaacttcaaaatgtttagctagttcgctaacggttgctatttttcggcttttgacatattggacaatggcgcgtttacgttcgatagatagcacttcttcccctccttttgtttaactatatggtaactccaatagaaaaaaatcgcaaacaatcaaaaaaccttggagcgattggccccaaggtttggaaatgaaaattaatcgtttaagcgtttttctagttctgcttttttgtcttcgaagcctggtttgccaagtaatgcgaacatgttggctttatatgcttctactcctggttggtcaaatggatttacgccatttaggtaaccactgattgctacagctttttcaaagaagtatactaggtagccgaaagtataggcatctagttctggtacttctacaacaaagtttggaacttcgccgtctgtatgtgctaaaagagttccttcgaatgcttttgtattaacgaaatcaactgtttcaccagcaaggtagtttaagccatctaaatctacttcttctttattgatagttaaattgtggcgtggtttgtccactttgataactgtttcaaaaaggttacgacggccgtcttggatatattgaccgatagaatgtaaatctgtagagaagttagcgctcgatgggtaaattccttttttgtctttaccttcactttcgccgaataattgtttccaccattcgttgaaatattgtaaccctggttcgtagctgattagaagttcagttacttttcctttacgataaagaacattacgagctgctgcatattggtaagcaatgttattttttagctctggtttgtcgaaatctttgcttgctgctgctgctccgttcataagcgcatcaatatctacgccactcactgcgattggaagtaaacctactgcagttaaaacagagaaacgtccaccaacgtcatctggaactacaaatgtttcgtagccttcgttgtcagctaatgtttttagcgcgccttttgctttatcagttgtagcgtaaatgcgttttttcgcgccttcttcgccgtattttttgattagaagttctttgaaaacacggaaagcgattgctggctctgttgttgttccggatttagaaataacgttaacagaaaagtcgcggtcgccaactacttcgattaagtcatgtaagtaagaggaactaatgctatttcctgcaaagaatacttgaggtgttttacgcgcacctttttcaagtacattatagaaggaatgatttaaagtttcgattgctgcacgtgctccaaggtaagaaccaccgataccgataacgattaatacgtcagaatcactgtggattttttctgttgcttttttgatacgagcaaattcttctttgtcgtaatctgttggtaaattaatccaaccaagcgcgtcattaccagcacctgtaccattatgtaatgaatcatgagctgcttttactgctggttcaagataatcaagttcgcgttcttcaaaaaaacggagcgctttggaataatcaaatttaatatgtgtcattgttttccctccaaattttaaaaaagtttctttattaactttatatcaatcaatgctttttagcaaggatagaccttgtgaaatttaagcctttttgaaaaattaggtatagttttcatataagactccctcgcttctgactagttcatttaaagataattggtctataggtaatagatcgtcagcaagtggaattggtatccattttactcgaaagacattgtcgtcgtttgaaaaagtcgccatctcaccaactggttttgctcgaaaaacaaatgtacaaacgtgttcccatgtagcacggcgctctttgcaatgtaaaattgactctatttctatatcaatatttgtttgttcttttactttacttgcgagtgcttcttccatcgtttggtctgtttcgacatgtcctcctggaaaagtccaagctaaattgcggtttctaactattaatatctcatctttcttctcgttgtacacaaatgcttgcacatgaatagatcttttcacgtaaatcccccttttttgactattttatacaaatgaataaattgaaaattactactaactattccctttttctaaaattttagtcaattaaatttatcagcctagcaatttatcccgaaaagggcattataccaagctgatggagatttttatttatctgcttttttaatccattcttctaatttatctcgtaatgtgttgaaaccttcatcatattcaccagatgatacgttttttttcttagctggttgttcttttggtgcttcttcagtcgctctaatagaaagactgattttgtttttttcttcatcaatgtcgagtatttttacttttacctcttggccaacttctagaaaatcatggatatcttttacaaaaccatgtgttatttctgaaatatgaactaagccttgtgtagaattatctagtgctacaaatgcaccgtaactttgaattccggcaattttcccagaaactacttctcccaccttgaatgtactcatcctcattccacctactttcaaccttacaatattttataaattataacacttaggcgaaactttaacaattattctaaatccttgtatggtaagcttttaaggtgaaatttatgctataattgagtcgaattaaagagaaggagcgtgacataattgagtcaatttgatgaagtcattccgcggattggaactaattcagaaaagtgggatggggcagaagaattatttggcagaaaagatattattccaatgtgggtagctgacatggatttccgtgcgccaaagcctgtacttgatgcattccagcgtcaaatcgatcacgggatttttggttattcaacaaaatcagcggcacttgtcgaagctgttattgattggaacaaagagcaacaccaatttgaaattgatccgagcactttgtttttcaacggggctgttgttccaactatttcgctagcaattcgttcgttaaccagtgaaggtgacgctgttctaatggtttcgccgatttatccgccatttttcaacgtaaccaaagctacagaacgaaaagtagttatgtccccgctcatatatgaaaaccaccaatatcgaatggattttaatgatttggaaaaacggatgaaagaagaaaatgtaaaattattccttctatgtaatccgcaaaaccctggtggtcgttgtttcacaaaagaagaactagtggaacttgctaatctgtgtgaaaaataccaaattccgattgtttcagatgaaattcacgctgatttagtgatgaaaaatcataaacatgtaccaatgatggttgctgcgccattttataaagatcaaattatcactttgatggctgctacaaaaacatttaatttagctgctattaaagcttcctactatattattacgaataaagactaccaagcaaaattcgccgcggagcaaaaatatgctacaactaatgggcttaatgtttttgggattgttggtactgaagctgcctacagggatggcgctgcttggttaaacgaactaaaagaatatatttatcgtaattatgaatatgtaaaggatgcaatcgaaaaagaagtaccagaagttggcgtaacggacttagaggcaacttacttgatgtggcttgattgccgcgcgcttcctaaagatgagaaaacgatttacactgatttaatcgaagccggcgttggtgtccaaatgggttctggatttggtcattcaggtaaaggttttgtccgcctcaacattgcttgtccaaaagaaactttagaaaaaggtgtaaaacttctgattcaaggcttaaaaaaatagcttattctgggaaactaagtagcaaatacttagtttctttttttaggaaattgaatatagctttggtatactattctttggaaagtgaaatagtgttcattttccgtttacataaatttaaaggagttggtataaccgatgtttttagggcttcgtgaattagtttattctaagttgcgctatattttagtaacaggcatcatggtcttaattatgttactatcacttattttatctgggctggcaaacgggcttgcttatgataatgcttcatctgtagcagataacggggttccatattatgttctcagcaaagacgcccaagacaaattatctagatctcagttcccagaatctaaactcgctgacgtgaaaaaagatgcgaacgtgaaggatgctgcggttctcggacaatctatgcaaacgttaaaacgggaaagtgacgataaaaagtttagtgtagcacttttcggtattcaaccagatagctttctcgctccaaaaatttctgatggagctaacatacaagtaacaaaacctgacgaaatcgtcgtcgattcttccttgaaatcagacggaatcaaaattggtgatgttttaatggatgatattttaaatagagaattaacggttgtcggctttacagagaatcaaaagtatagccatgctcccgttgtttatattaatatcgcaacttggcaagagattaaccctgttttatatcaccaaaaaatcccgcaaacaagtactattgcgattaaaacagacaaccctgataaaggtgtaacactctcggataaagatttaacgacaatcgatcacaaagagtttttaaatcaaattccaggttattccgcggaacaaatgacgcttaacatgatgattttcttcctaatcattattggtggatttattttaacagcattcttctatgtaatgacgctccaaaaaacaacgcaatttggtattttgaaagcacttggaacgaaaactagttacttagtgaagagcattattactcaagtggtgattatttcgattattagtattttaattagtgtcggtgtgacgctgctgcttccaagtattatgccagcagctatgccgtttagattgagtccaatgacgattgcgctttatagtggcttattcttcttagttgctctatttggtgctcttttatcacttagacgaattgctaaagtagatgcattagatgctattcgaggaggtgatgaataatggaaactctattatcttttgaaaatgtatacaaagattacccgtctggtccttcaattattcatgcactgaaggaaaccaatttcgaagcgaaaaaaggagaattaatcgccatcgttggtccaagtggttctggtaaaagtacgctactttctcttgccggagcgctattaacaccaactggcggaacgatttccataaacggcaagtcagtcggaaacttatcttctaaagaacaaacggctcttcgttaagaagaaattggctttattttccaagctgctcacttagttccttatttacacgtaaaagatcaaatcagctttattggaaaaatggcaggaaaaagcgcggcggaacttgaaaaagatactgcttcccttctaagccaacttggaattagcgatcgcgcaaatttctatccaaaagatttatctggtgggcaaaagcaacgtgtcgctattgcgcgagcacttatcaaccaaccttccgttattttagccgatgaaccaactgcaagtcttgacacagaaagaagtcgtgaagttgtggagctcatccgaaacgaggttgttcaaacgagtcgaactgcgattatggttacacacgatgaacgtatgttagatttagtgaaccatgtgtatcgtatggaagacggaatacttacccaagaaagctaaaaaacctgcgtggcttaactgccacacaggtttttttactgtttatttttggaacccatcaattaaatctaatgcttgaccgagtactttttcaccgttcattgtaccataagctgccatgtcgataacatctactggaattttcccagcagctagctcatcaactgtttttttctgataacgtacttgtggtcctaaaagtactacatctgcatcatcaattaagttacttacttcagcaatggagtatgcttcgatttcgcatgtttctccacgatcttcagctgctttacgcatttttgttactaaaaggcttgttgacatccctgccgcacatactaaaacaatatttttcatcgtaatctttcctttcagattaaggctgctttttttgtacactcttattataactacctttagctttttaaacaagtaaactactggtgccaagataaaattattaaaaatgcgaaaaaacattgcgatttcacgtaaaaagagcgataatagacaataactttatccgaaagctcagaaaatttcgcatcatccaaatacaacagtttcgggagataaaaattcagatcaggagtgtgttgcatgaaagtaattaaatttggcggaagctctttagcatcagggattcaattaaataaggttttccaacttgtagcggaggattctgaacgaaagatcgtcgttgtttctgcacctggaaagcgtttcaaggacgatacaaaagtgaccgatttacttattgattgtgcggcaaaagcacttctaggcgaagatacgagtgaactatttgaagccgtcattgcgagatatgctggcattgcccttgatacaggaatggatgacgcgattatcacacaaattcgcgccgacttacaaaagactatttcgtctgataaaagcgatcctgataaatttttagatcgaatgaaggctagtggagaagacaataatgcgaaattaatcgctgcttattttaaattcaaaggcttaaacgccaactatgttaatccaaaagatgctggattatttgtgacggatgaacatgctagtgcccaagttcttcctgagtcttatgaccgtttatttgcgcttcgagagcgagaaggtatcattgtttttccaggatttttcggttatacgaaagacggtgaaatcagtacattttctcgaagtggctctgatattactggagcgattgtcgcaaacggggctcaagctgagttatacgagaactttactgatgttgatgcagtgtatgcggtcaatcccgctattgtgaaaaatccgaagaaagttcttgaactgacttaccgggaaatgcgcgaactttcttatgcaggcttttctgtttttcatgatgaagcactgattccggcgttccatgcgggtattcctgtgcatattaaaaatacgaacaatcctgattcttgtggtacacgtgtcgttcatgaacgcgaaaacaataatggtcctgtcgttggtattgctagtgatgatggcttttgtagcatttatattagtaaatatttgatgaaccgcgaaattggcttcggacggaaagtgctgcaaattctggaagatgctggattgaattatgaacatatgccgtctgggattgatgatttaacgattattattcgtgaaaatcagtttggtgaggacacagagcggacgattatgacgcggttaaaagaagaattaaatgccgatcaagtgattatgcaacatggtatctccctgattatggtcgttggtgaagctatgcgccataatgttggaataacctcgcgtgcttcgaaagctttatctgacgcgaaagtgaatattgaaatgattaatcaaggttcttctgaagtaagtattatgtttggtgtgaaggaagaacaggaaaatacggccgttcgcgcactatacaatgaattcttttcagaagtcttagtctaaaaaaacaagtttttcatcctgattgatgagaaacttgttttttgttatttatttgcttcttctaattggtggtctttggcgattatatcaataatataatcataagtactaacgcggtaatgcttaaaatcttgaacgttataatcatttcttattttcactcgttcatggattaaattagactgctcgattatttcaaaattgctctgacttgttaaccaactcgtactccatttgcttttttcgtaggtgtcgagttcggtggatgagtggaaaataaacccgttaaaaatcatatttaggagtatgctttcttcttcaaggtcaacttctatggatagtgtgagttgattaggagtttggtgtaagctgataagccaagttttgtctcgaccgtagattagttgattgttgatttttattggagatgaaatttctatatttttcacgactcctatctgtaattattctaccgcattctaaaaagagcactttctatgaaagtgctcttcattcattatttaatattaatcttctcaatcacaacgtcattcactggtttgtcttgcatgccagttggtaggttggcgatttcgtctactacgtccatgccttcgattacgtgaccgaaaactgtgtggcggccgtctaaccatggtgttccgccttgtttgtaagcttcgataatttctactgggaagccagcttgttccatttggccaagcatgtcagcaggcatatctggtttttgaacgatgaagaattggctgccgtttgtgtttggaccagcgtttgccattgatagagctccgcgtaagttgaaagcttctgtagagaattcatcttcaaaagattcgccccaaatactttcgccaccagtaccgcggccgtctgggtcgccaccttggatcatgaattcaggaataacacggtggaaaataagaccatcatagtagccgtttttggaatgtgtaacaaagttttctactgtttttggtgcaatttcagggaacagtttgatgcggatagttcctcggtttgtaatcatttctgcttcgatttcattaggtgccacttcttttgataattgtgggtaagtcatattgtaaaaactccttcttttgtttaaatttattgtttactaacgtagccaaataataagcaaattaacaacgacagcaatcagatacagtactagtataacagctgaaacccaaataacaatttttttaaccaaaaatgcacatccttcactttatttttcattcactatcttttattctataatgaaaaggacagttttaacaataatacgaatagagatgattcttttatgacaactcgaacacggaatttatacatcttaatgctggccaacctgctgatgtcagccagtatgacaatgattatgccctttttatctctttacattgaaacatttggcgattatagcaatgcctacgtccaaaggtgggccggttatatttttggcgtgacatttttagttgcgtttatcttttcgccgatttggggtcgtattggtgataagcacggttataaagggattttgattctgacttcgtttggtttatcagtttgtatttttttgatgggatttgcgcattctgtcacctatttactgatattgcggattttcatgggggttgtaactggctttattggcgttagtaatgcctttattgcaaggcaaactcctcgtaatgaagctgggaaaattctcggtactttgcaacttggaggcgtgactgggatgctgtttggtcccttgattggtggggcgatggcggatttatttggctttaaagatacctttacgattaccgggattgcgatgatggttgcggctttaattgtcgcttttggtgtgaaagaaatccgtactgaagaacaaaaagaagctgccaaagtcgtttattctcgtcgtgcagttttaaaacaaatttttacgctacgagttctattcacggtgatggttattactgcactcatccaaattgcgaactttagtgttcaaccgttgcttgcgctttatgtcggagatatgacgcaatcagacaatattgctttcttgtcagggttggcgttttctgcgacgggattcgggaacttggtgatgacgcgaaaatggggacagcttggagacaaatatgggtatgagaaaatactaaatatcttgttgattatggcggctgtttttgttattccacaggcattcgcgacgaatctttgggtgtttatcttcttccgctttttattcgggattgcgattggtggtatggtgccatgtacgacagcttatattcggcttgcggcgcctggtgttatgcaaggcgaaatgcttggctataatcaaagtgctcgctttttaggaaatgttatcggaccaatcctcggtgggacgctcgctggtttcacaggaattccgagtgtgttcttatttatgagttttatgttcctcgtggcatttttcattttgctttatgcgttacgttccgaccgaatacggcatgtgaacgtagattgagtttgacaaacctaagttttttcttaggtttgtttttttgttcttcctatttaattgttttttaacattgcgtaaattgatttataaagttaagtttcctgcctttttttcagataaaaaagtatgttataataaaaaatataaaaagtacggcgtttatttgggtacttcgtgaatagtaaggttgttgaaatttgatgagttagcgcaattttttaaaatgttagttagagctatgtttcattaaatgtaagtacttgcttaaaaaataatgatttcctgttcttattttcacatttccaggatgagtttccgtataaaaattcttcgaggaggagccgatattgtcatttcttcatctagcaattgttctgccatttattgtggcactgctaattccacttttttaccggtggactaaacaagttcatactggctggttagtacttccgattccagtgattttgtttatttacttcttaacatttattcccaaaacgatggacgggacaacgattgtttcaatgccttggattccgcaacttgggattaattttacagtagtagtagatgggctaagtttactgtttgcgctacttattactggaattggttcactcgttacattttactctatttattatttagggaaaaagaaagaacgacttagcaatttctatacatttttatttatttttatgacggcaatgcttggggttgtcctaagtgataacttgattgtcctctatcttttctgggaattaacttcgattagttcgttcttattgattgggtactggtatcatcgtgagcgttcaaggtacggtgctcgtaaatcgatgatgattacagtcttcggtggactaatgatgctcggcgggtttattttgcttcatattatgagcgattcttactccattcgcgagattattagtaacgcggacgtgatcagtaataatagtttattcattcccgcaatgattcttgtattgctcggggcatttacgaaatctgcgcaagtaccatttcatatttggctacctgacgcaatggaagcacctactccggtcagtgcctacctccactctgcaacgatggtcaaagctgggatttatattgtcgctcggttaacgccgctattcgcaagttcgggtgtatggttttggacggtatcactcgttgggattacgacgcttttctggggttcactaaatgccacaaagaaaaacgatttaaaagcgattttggcttactcgacaattagtcaacttggacttattatgtcacttctgggtgttggagcggcctcgcttcattttgacacgctaagtgatgatatttatgtgatggcgattgtagcggctgtcttccacttgtttaatcatgcgacatttaaaggaagcttgtttatgatggttgggattgtcgatcacgaaaccggcacgcgggatattagacggcttggcggattaatgcgaattatgcctattacagcaacgattgcatttatcggaacatttgcgatggctggtattccaccatttaacggatttctaagtaaagaaatgttttttgaaagcatggtaaatattacgcaattgcaattgtttgacgcaagtacttggggcgttctgcttcctgttgttgcttgggttgctagcgtatttacatttgtgtatagcatgattatcttctttaaaacatttactggaaaactgaagccatacttacttccgaaaaagccacatgaagctccgtttggactactgttgccaccaattattttatcaatttttgtggtagggattgggcttttccctaatttaattgcagagccgattttggaacctgctgtaagagcgattgttccaggacttgctactgatttttccattcatattggtttatggcacggatttacaccagctttattgatgactttcggggttgtcgctgttggtattggcttgttccttacacataaatactggaagccttggattactactcgagttccaaaagcacttcgaattggcaaaacatatgataatgggatgtattatttagaacaaggttcgtatcggatgacgatgtttattatgactggttggctacgaacttacttaaactatatgttatcggcctttattttaatgatggcttcggtaatgattttcacgaatgcacttgatttcaacttttcgagtatgacgaaagtaacggttgttgattttgtattagctgctgttattttagtgactttggttgggattgtcttttccaagtcgcgtattacttcgattattttacttggagcgatgggttatacaattagtattttctttgttatttcaagagctcctgaccttgctttgacacagcttattattgaaactatttccgttgtgctttatctacttgtgttctatcaccttcctcagtttagtaatattgaggaaaagccgaaatggttttcaatgaagacgatattgagtatcggggttggtgtgattattacactggtttccctttcagcgtataatacgactttttatgactcaatttcaaaatactatgtcgataatgcttacgtggaagcggcgggacgaaatattgttaatgttatcttggttgatttccgtggttttgatacgatgttcgaaaccgctgttctgtcaattgccgcgattggtatttacgcgatgattaaattacgactgacgaaacgaggtgagaatgatgaaaacgaatgacgttctactgagaaatgtaacaaaagttgttgctttcattattttcttattctcgcttcacctcttcttcgcagggcattataatccaggtggcggatttgtggccgggcttacaacagctggcgcaattacgttaacattacttgcttatgatacaaaaacagtcgctagtatgcttaatatcaatacgattatgctcactggtgtcggtcttgtttttgctctaggtacaggaatgattgggattttcacgggtgaccctttcttaacacataagtttggtcatgttgatttgcccattttaggagatactgcgttacacacggcgactttgtttgaccttggcgtttacttagttgttgtcggtgtaacacttacgataattcaaacgattggggagagtgactgatggaactattaatgtctatattaatcggcttgatttttgcagctgctgtctacttaattctctctaaaagtttgttacgaattatcattggaacagctgtcctaagtcatggcgtcaatttacttgtactaacgatgggtggactgaaaaaaggtcgcgtaccgattcttggtacaccgggatctggaacatacaatgatccccttccacaagcacttattttaactgcgattgttataagctttggtgtaactgcctttttccttgttcttgcttatagagcgtatcaggagcttgatagcgagagtgtatccaagacgagaggacatgaagccgatgatgaataatataattttaatgccgattttgatacctttccttggagcaattacgttaatgctactgccaaaacgggtcatcgttcaacgagttttcgccctaatatttagtggtattctggttgtggcaacacttggacttgtgttttacattcgagaaaatggtatcacaactgtgaatattggtaactggtctgctccttttgggattacgatggttggcgatatgcttgcgattttacttacggcaacgactagtattatccttttctgcgtgatattttattccttttatacgattgggaaaccgcgtgagaaatttctttattacccagcgattctctttatgattgttggggtgaatggttcgtttttaactggtgatattttcaatatgtttgtattctttgaagttatgttgatggcatcttatgtacttcttgtcattggtgggacccaagttcaactgaaagcaacgattaaatatttactgataaatgtggttggttctggatttttcgttgtagcgattgcactgctttattcgatgattggaacactcaacatggcagatatttcacaaaaaattacggacttaaatggtgccaatacgggaatgataagcgttgtcgcagttttattcttgtttgtattcggactaaaagcaggactcttcccgctttatttctggcttccgggctcttactttgctccaccaatcccagttctcgctttatttggcgggcttctgacaaaggttggggtttacgcaattattcgaacgtatacactatttttcagttcactaactgactttgttgttccgctacttggaatactcgcgattgtgacgattatccttggcgttataggggcaattagttattatgatatgaaaacaattgtgatttacaatattatgattgcgattggcgtaatactatttagtgtttcgattatgacacgcgaatcgatgactggtgccgtattttacttgattcacgatatgataatcaaagccgcactcttcctcattgttgggattgtgatggcgattactggttactctagcgtgaaaaaattcagtggcttaatgagcgtgaagccgtcacttggttggattttctttattgccacattaggcctttcagggattccacctcttagcggatttatcggaaaacttttgatagtcgaaggagctttctcagctggtcaaattgttggcgggatactcattttattatcaagtttattcgtccttatgtctttaatcaaagtctttacaagaggtttttggggtgagaaaaaaggcgtattcaatctacaaattccgtataaaaaaatgctcgtacctgtagttattctacttgcgatttctattggttatggcgtgtttagtaacgcaatctatccgtttattgaacaggcggttgacccacttgttgacccttctgtttatatcgatgcggtgataaaggagtgataaaagatggcttttcaacttattcttaatataatacttgcttgtttgtggatgtttcttgagtcatcatttagttttgcgacatttatcattggctttattatcgggatatttttgcttttatttatgcgacgctttcttgggtcaagattttaccttttccggttatttgccctcgttaaactagttttccgtttcttgcatgatttaatagtttcgacggttcatgtaagtcgaattgttttgaagaaagatatgaacattcgtccagggattttcagatacgatacaacacttgaaactgactgggaagtaactatgctcgcgttattaattacattgacccctggtacactttcgattgatatttcggatgattataaagcaatctatgttcattcgcttcacgttccgaatatcgaagaagaaattgcaacgattcgtaaatcttatgaaggtgcgattatggaggtgttccacggatgattattcaaatagctttatccattggtttacttctttattcgatttctaccttcttatatctttaccgtattttaaaaggaccaactacttctgataaagtcgtggcgcttgattctattggcatgaatttagtggcaattgttgccctcctttcaatgttttatgacacccatgcctttttagatgttatattacttattgcgctccttgcctttattgggacggtttcctttgccaaatttattgagaaagggaaggtgattgaccgtgaacgtgataattgagattattatttctattatgattttaattggtggcttgcttagtattctggcggcaattggtgttatcagactaccggatgtttatacaagaacacatgctgctgggattagtaatacatttggcgttagcttgcttctttttgcaacggttggttattttttccactcaggtgaaggttttaatgcgcgagtgcttctggcagtgctgtttattttcttaacgactccagtagcctcccaccttattaaccgggccgcttatgatactggtgtgccgctagcaattcgaattcgtgaccaattgcgttcggtgaaaaaagacgacatcaagaagaagaaaagccttattattcgccaagaacaaattgaaaaagcacgacaagaacgagaagaattggaagaacgaatggaatgggaacgacgcgaagaaaaaatcgatgagcgtgaagatcaagaagagcaagaacgcgaacgcgaggaacaaacgattgaggaacagtcggatgattccgagcatgaaatcatcgaacaagatgaaagtgaaactgattcagacgaagatgaatcagagaaataaaataagcatggcgagagttcatcaattgacctctgccatgctttttattttcgtttctttttaactgctatagtacatctgctaatacaaattagtttttccgtttcgtcagtgattttaatttcccagacttgggtacttctgccaaggtggattgcttccgcggttgctgtcactaatccttcttgttttgaagcgaggtggttggcgttaatttctaaaccaaagacgatttcatcaggttcaattgatttcgcagcaccaatactcgcagcatgttctgccaaaacaacagaaactccgccatgcaaatagccaaatggttgatgaactttttctgttacttctaactgaacgactgcttttcctttttctactgaaacaatttcaatgccaatagtttcttggagtcccatatgttcccttctttccgaatttgatttatactttattatataagagttagaagaaaaattctagaaaaggtttttaataagctcattgtggtaaaataagaatagactttttgacaggagagatttgatgtcgatatttacgaatacaccattaattgcatctattattgcgatagtgtttgcccaggtggtaaaagtgccgattcatatattagtttaccggaagtttaacctcggactaatgttttccactggtggtatgcctagctctcactcggctgcggttactgcactaatgacaacactcgcaattgaatacgggctagattcaccttatttcgcgattgctgttgtatttggtattatcgtgatgttcgatgcgactggcgttagaagacaagccggtgaacaagcagttattttaaacaaattagtaacagatttccaagacttcgtggagcatgcaaaagggcttgcggcacctgaacaagaagaaaaaacgaagcatttaaaagaattactcggccataaaccaatggaagttttctttggggctttgaccgggattgcgattggatttattttagaaatatttatgtaaataaaaagctgactcattgtagtcagctttttttcatgagcaatcccagttatacataatgttagaaaagtctcgattgattaaatcttgtttattaatgaagaagttcgcaacaccgcagtcgccccacataatcgccattctgttatcgtcaaaatcttcggaagctaattggaataaaagcgtgtcgtgatggggattttctgcatacatacgcggatcttcttgtgtgaagaacggatacccgccgagctggctgccttcgtttgctagattgtataactgatcagctttatcttcctcatcagcaaaaatttgatcagctaactcataaaaattattcccaaattcattttcaaaatcaaagctatcttgtagcaaaatttgatccgatacttgaccagtcattttaaattctccattcacaactggataaaaatctgttttcgctacatcttcaaaaaacgcatcttgttcttctttggacaggctctcgctccctaagtcatcaaagaaaaacacccgaaaaccttcctggctcgtaggattttcaaaattaagtccgtataaatcatcttgataatccacataaaaagcaagcaagccaaattctggataattttccatttgcggcatttctgaaaaattaatttgcgctaataacgaaagcggcttaccttcttccgtcaccggatagccttgttctttcggcaaataaccgcgaccaccagctttactttgtaacaaggaaagtgtacccgcatctttaaaatgcaactctatccgctctttttctgtttccaaaaagcgttcggcccattcacttggaagtatatcaaaaagttgttccattatttaccttctttcttttttgtaacgtgcttctttaacaatcccagttaaaaataacattggaaaaatcccgattaattaaatcctgtttattaataaagaagttgccgactccactcatgccccacatgatatttatttgggcacctggctcttcactgtactcactatctaattgaaacagcaatgtgtcgtgatacgaattttctgtacgcattcgcggatcttcttgggtgaagaacggaaaaccaccaatttgactactatatgttgcaaggtcaaatagctcattcgctttgtcttcatcatcaccaaaaatttgctccatgatgtcataaaaaccactgccaaattctttctcaaactctagaatatcattcatcaaaagctctttcgttactcgaccagcaagtttatactcccctttgaccacagtataaagggctgatttatcaataccttcaaaataaacagcttgttcttctgcagtcatgctctctctgtctatattctcaaagaaaaacacccgaaaaccattttgttctgtctgatcatcaaaattaagaccgtataagtcatcatgataatcaacataaaaagcaagtattcctgattttggataattctcgatttgcggcatttccgcaaaatttatttgcgctaaaaagaaaagtggttctcctccttcattcactggataaccttgttctttcggcaaatatcctctcccaccaaccttactttctattaaagaaatcacgtcttcatttgtaaagcttaactcaatacgttctttcattgtttttgaaaatttttctgcccactcactaggaagtatctcaaaaagttgtttcatggacttacctactttcatttttccttcattataacataacaaaaaagcaatatctgcactaacagatattgcttttagaagtcttatttataaaatttaaacttacctttactagcaagaacgcctgaaccaccaataagtagtagcgcgcggtcatcaatgacttttttcataacggaagctgggtagcctttcaggtttttgccgaaaacaacaccgattgcgtcgttatcacctagtgagcaaactgttcctttttcatgataaacaaagtcttgtagatctgtttcgcctttaactaatttagctaagttcactgcagccacatctgcttgttgcattgcaatttgagcagttggcgggaatggacggtcgtttgcagggttgatgattagtgagcagtcaccaacaattaaaatttcttcattaccaggaacggttaaattgttgtttactttcacacgaccacgacctgcttcaaaaccagacgcttcaataacactgttaccacgaactccggctgcccaaataattgtcgctgctttaatttcgcgtacttctgtttcactttccgcatatttaacaccgtcagctgtagcttctttgacaggtttaccaacatggaattctacgccgcgatcttccagtacaccaacaccataatcaacgagtttcgcatcaaattgtggtaatacttttggagctgcttccatacaataaatgcgcactttttcgcgaggcacatcgtactctttcactagttctggaatgcgattagttaattccccaagaaactcaattccagtaaagccagcgccaccaacgataattgttaataattcatcgcgtggatctgttttccatttagcaaattgcgcttcaatgtgcgcacggatttttttaacggattctacacttgtaatagtgaaggcatattctttcaaaccactgattccaaatgtttctgcttctgacccaagtccaattaataaatagtcatagctgatatcgccatttgcatctagtgtgactgttttttcgtctttattaatttttactacagtatcttggataaatgtagttttcgtattgtttacgactttatcaagtggatacattagtttttctggctcaattgttccagctgctgcttcatgtaaccaagtcgtttcgtggtggtagtcattcttattcactagaacgatttcggcatccaagtttctttgttgtaacttacgtaaagtttttagtcccccgtatcctgctccgagaatgacaatttttggtttactcatctgttatcacatctactttcccttatatttttcttcacaaaaaaaattgcattaagaatttcttactgcacctatgtagattgcgctaaaaatctactgcaaccagtgaaaaaagcggaactggtaagtaccaattatattccctctttcacagcttacaaactatatcatagactttttaacttgcattttcaaggaagggaactcaagggtttatgcttcttagcggtaaggttagagtggtatatgatttttttcacaataaacctctgagatgacttggttttcgtaaaaatcttttatttgagtggtaattggtctagttcatttttccagattttttaataccccaatcccgtaaacattctttttcaaaaatatatgctaaaatatgcttattgcaactttagctatttcatagggaaattaggaactagggggtgatgtattttggatgaaaaaacaaaaatttatgatatcacgatcattggtggcggaccggttgggctatttgctgctttttatgccggaatgcgcaatgcgagtgtgaaaataatagaaagtttaccgcaattaggtggacaactttcaacgctttatcctgagaagtatatttatgacattccaggctatccttctgttcgcgcacaggaactcgttaataatttaatacaacaaatgaaaccatttgatccgacagttgcgcttgaagaagcagttcaaagcgttgaaaagcaagtcgatggcacatttgaaatcatcacgaagaaagatacacactatagtaaagcaatcattattactgctggtaacggagcatttgaaccaagacgtttagatcttccggaagctgaacaatatgaaggaaaaaatattcattatttcattaatgatcttagtcgtttttccggtcgtcgcgttgctgtttgtggcggcggagattctgcggttgactgggcgctaatgcttgaaaaagtggcaagctctgtttcaatcgttcatagacgtaacgcttttcgcgcgcacgaacatagcgttaacaatttagaaaagtcatccattgcgattaaaactccattcattccaacagaagttcttggtaacggcgataaattaacacatattacgcttcaagaagtcaaaggtgatactacagaaacgttggaaattgacgatttcattattaactacggtttcgtttcctcgctcggacctattaaaaattggggcttagagctagaacgtaattcaatcatcgtcaattccaaaatggaaacaaatatcccagggatttactgtgctggtgacatttgtacttatgatggtaaagtaaaactaattgcgacaggatttggtgaagcgccgactgccgtaaataacgcaatgaatttcattgatccaaaaacccgagtgcaaccaatgcattccacatctttattcgaataataactgaaaccacgaggcgacttgtggttttattttttactcaccgggaaaagttctttgtagatattttttaggaggagattagcaatgaatgtactcgtaattggcgcaaatggcaaaatcggccgtcttttagtagaaaaactcgccatggaaaaaggctttttcgtccgagcaatggttagaaaagcagaacaagtaagtgaacttgaaaaacttggcgcaaaaccaataattgccgatttaaaaaaagatttccactatgcctatgatgaaattgaagcggttatttttacagctggctcaggtggtcatacgcctgcatcagaaacaattaatattgaccaaaacggcgccattaaagcaatcgaaactgccaaagaaaaaggtgtacgtcgttttatcattgttagctcttacggcgcagatgacccagaaagcggtcctgaatctctcgtccactatttaaaagcaaaaaaagccgccgatgacgaactcaaacgaagcggtctagattacaccattgtgcgaccagtcggcctttcagacgatccggctacaggtaaaatctcagaagtctcaggaaaacctaaaacaaacattcctcgcgcagatgttgcaaactttattagtgaggctttaactgagaaatccagctactataaaacctatactatcgaaagcggcgaaacaccaatcagccaattttttgattaataaaaagcgatgagccagattacgcgctcatcgcttttttctatattaaaacggattttcttccaaaaatgtatatatattcgcaaccaattcctccgctgtttctccgcgaaccacttctccgtccactagagcaaacaaacttgtcgcgcataaatcacaatatgtcagacaatcatattcaatcacgtctaaactatcatccgcatctaatttcgcaaacgccgcatcagccccgctcgccaaattattaacgcaaaattccacaatcggattcatttccacttgcctcctagactgttacatcgttgccaagtaaccacggtcggtcattacttgataaatatctttcaaccgaggattgccttccgcgataatttcaccgtcaaccacaatgactggatacatataatcttcatcaacaatcttattcgccatatctgctaaagccgcttcatttggcggattaaaaatatctacatattccactacaaaaggctgtccagaaaacttccgaccaatcgcagctcgaagccattcctctgtttctttcgaggacggtgctccgacacaactcgcacaaatagtcgttgaaccatatacatataatttcgcttcatttaccatcatgcttcacctcactatcattgtacaaaaacctaccccaaaaagcgactaagctgtctcatttagcataactattaaactttatgaatttttataaagatatgaattgacacaaatttctagatatattataatatttccaatacattgcaaatctttaaagcagtagtgtattagcatgataaaccatctataggttgtacccgtgatttcacggtcaacatataagtaacactccctttaacaattgggcgcgcaacccaattgtctttcaaccttaccagttgaaagagcacgttcctttctgagccttaggaacgtgtttttgtttggatcgttcgaagcaaagcgagttacgagccaaatatgcatgcgagcaaagcgagcatgtaatccttccagtaaagtgcgccctccacacaaaaacttccctcccatcaaaatccatccaccatcaatctaaaaccctccatcccattcggcccgttcgaagcaaagcgaattacggccaaatatgcatacgagcaaagcaagcatgtaatccttccagtaaagcgctccctccaaacaaaaagccccacccatcaaaatccatccaccatcaacctgaaatcctccatcccattcgacccattcaaagcaaaccaaatccccccaaaacaaacacacactcaccctcccccaaaccccagccaaaaaactaaccattcaatatttttagaaaaatttaaaacctaacaactaatttatatgttatatatatccaaaaaccctcctcccacaccaaccaacaagcgaaaccctttctcccacctacatccccgccctaaaaaacaaatatgtccaattaatgaagctcactctactttcaataaatttcttttagaaaacccatgatttatgaagagccctcatggtattataactttgctttgaagtgtattcgattgaaaccactagattctcgactaattttgttgctgaaatagtcagttttaacgaataactaattacgaatacattccaaaaaacaaggaggaaattagacatatgcaaaaagcaatcaaaataatgttagctttatttttaatcacaaccgcatttttaccttttagtaatgtacggggagcatcaactgatgtagtaaatatcccagatccgtatttaaaagaaggtcttaaaaccatcgtaggtaatccgttattagacgaattgactgaagcacaccttgagacgattagtacagcggatatttcctatatgttcggttcatctggatatgctgtcactggattagttagagatttaactggactcgaaaaagcggtcaatatgaccaaactatatttttcaaaccaaacagaaatcactaatttaaatcagattaagaatttacctaagctgaaaaaaatcgttggtattactactggattaaatgatattaaagctcttggcgaaatgccagcgctcgaagaagtagaactaggcggggattatattactgatttcactcccttacttgaaaaagaaaacttaaaatcattttcttataattcgtatgcttggttagatccagcatatcaccaaatcgataatgaagaatttacaaaatttgcaaaccttaaatcactcgaaactttagatgtaacttggaataatatttctgatttagcagcattaactgcagatgatcatattacacacttaaatctaagttacaacaagttcactaatgtagctccaattgctacgatgaaaaaacttaaagtcctttatttaaacaataacaacctaacttccattgattctttaaatacacttagaggattatctattgcttacgctgataataatagcattactgacttaagtaagttaaaagacttttttgaaggcatggcagtcgttggtgattataaaggtttacaagttaacaaccaaactatcacacttccaactattaatattaaagaaggggcaacagctatttcaaacaaccctactttggatattgatggagaaaaaatgcctgtttctagtatttctgacgctggaacggtatcagctgataataaaacagtctctttctcaaacttaccaattggaactaagactgtgacttacaacgcgacattcacagctacttccgctaaaggagtaccgcttagttactccattaaagtatcacaaccaattaaggtatctgaaaaaacaaattcagctgtaaacgtattttataaagatgaaaatggcgatgaattagctccaagtgaaacaatttctggtaaatccggagaaaattaccaaacaacagaaaaaacaattactaactacaaactaaaagaaatcgaaggccaagcttccggacaatttggcgacagcgatacaacagtcacttatgtttacgaaaaagcagatggcgctcctgttaccgttaaatacgttgatggtgatggcaacgaacttgctacttccgacacgctgaatggcaaaatcgacgctccttaccaatcgacagccaaaagcatcacaggctgggcagttaaaactacacctgccaacgctaatggcgtatttacaaatgctaaccaaactgtcacttatgtttacgaaaaagcagacggcgctcctgttaacgttaaatatgtcgatgaagacggcaacgagcttgctacttccgacacactgaatggcaaaatcgacgctccttatcaatctacagccaaaagcatcacaggttgggcagttaaaactacacctgccaacgctaatggcgtattcacaaacgctaaccaaactgtcacttatgtttatgaaaaagcagacggcgctcctgttaccgttaaatatgtcgatgaagacggcaacgagcttgctacttccgacacactgaatggcaaaattgacgcaccttatcaatcgacagccaaaagcatcacaggttggacagttaaaactacacctgcaaacgctaatggtgtattcacgaacgataaccaaactgtcacttatgtttacgaaaaagcaagcggcgctcccgttaccgttaaatacgtcgatgaagacggcaacgaattagctactcctgacacgctgaacggcaaaatcgatgctccttaccaatcgacagccaaaagtctttctggttgggcagttaaaactacgcctgccaacgctacaggagtattcacagacactaaccaaactgtcacttatgtttacgaaagagtagatggcgctcctgttaccgttaagtacgtcgatggcgatggcaatgaacttgctactccagacacactgaacggcaaaattgacgctccttaccaatcgacagccaaaagcatcacaggttggacagttaaaactactccagccaacgctacaggagtattcacagacactaaccaaactgtcacttacgtttacgaaaaagcagatggcgctcctgtcactgttaaatacgtcgatggtgatggcaacgaactcgctactcctgacacactgaacggtaagctagatacttcttacgcggcaacagctaaaaatttgagcggttggaagttaaccgctacaccagccaatgccacaggtgtatttacaacagatgctcaaacagtcacctttgtatatgctaaacaagaagatgatcctaaaaaagaagataaaacaccaagtaatacacaaccagataaagacaaaacaactattaaaatcaatgaaaacaaaccaaacacaagcaaaccaaccacaatcaaaaaacaaacaaaattaccgaaaaccggcgataatcaacaagaaagtatattgttcggattaattggtacatgtttcgttctcttaggaatttactcggtttctaagaaaaacagctaaaacaaacaactaaaactctcttatccagctgataagagagtttttatttggaaattactccaaagtacactactttccccctcggaaaaacccaatttaatttctttaattttttccgtatcctgttataatagagaatatgatagtgcctcgcgaaaggagaactatatcctatggaagaaattagttatgccgaagttgataaagctttaaaaaagttccgaccgtttttagttcgtgatggcggggactatgagcttgtggaagtgaccccagacggcattgtaaaaatcaaattacttggtgcatgcgaaacttgtccaagttctgatatgactttaaaaatgggaatcgaattgactttagcagagaaaattatcggatttaaagaagtcgttcaagtattttaagaactactattttagcgaccaaaataagcggtcgctatttttgtataaatatgtttagaaatcctgtaaacgtctatcatacaatatacatacagttagaaggaggtaaggacaatggtagaaaaacaaagcgccctagaagctaaagctcggagttggctgattgaacgtggcgtagaaatagatgacatcgcagaattggtattatttttacaacaaaagtatcatcccggattagaattagaaatatgccgtcaaaatgtagagcacgtgcttcgtaaacgcgaagttcaaaatgctgttttaacgggcatccagcttgatgtcatggccgaaaaaggtgaactcgtccaaccgctacaaaacattattagcgctgatgaggggctttatggcgtagatgagatattagcactttctattgttaacgtatatggttcgattggttttacaaattatggttatatcgataaagtaaaacctggtattttggcaaaactaaacgaacatgatggcattgctgttcacacgtttctggatgatattgtgggagctatcgcagctgctgcagcaagtcgtcttgcccatagttaccatgatgatattgttaattaaacaaaaaccagtaaaactagaggtcattcctccgtttttactggtttttctttgccacgttttacttccacttgcctgattgagtttttattcatcgaacgaacgataaaccgataaccttcatgttcaatctcgtcccctgtttctaagtcaaagcgttcgagcagcatccaacctgatagcgtatggacacccggactttcaatcggaacgccaattgcttcctctacttccaaaagcggctccgatccctctataatgaaatgatttaatgccaccttacgtattcctttaggtccttttgcttcttccatatcgccgacaatcacttccatgacatcttcaagagtcacaatacctgaagtcccgccatattcgtctgttaaaacgacaaatggttcgctttcttgttgcatttttacgagtaattcttctaaaaccatcccttcaaacacttctaaaactggcgatataaagggtttgattgattgttctacaatggcttcatcttttccaagaccggccatgactgcactgacacgtaacatgccaataatatgatctttgtcttcatcttcggttactggaaaaatatgatatgtatgctcggaagttagtttaagcaaatctcgtactgtcgctgtttggtcaatggcaatcatcgacatccgcggaatcatgacttcttttgccggcacatccccaagcttgaaaatatttttcatataacgaaattcttgtggatttaaaagaccttgccggtagctatcttcaaaaataattttgagctcagtcggtgtcatttgatccgcatcatcagtacgtttcacaccaaacatccgcgtaattaaatttgccgagttatttaaaagccaattgagcggaaaagttaggcgataccaataaactagcgggcgcgcgatgaataatgctactttttcggtactttgaatggtgaatgttttcggggctagttccccaagtaccacatttaaaaaggtaattaaaatgaacgatacaaaaatcgaaatcggtttttccagtgattcgggtagtggcagcattaaaaaaagtggttctagccaaccgcgcattgttgcttcaccgacccaccccatcgcaagtgctgcgagtgtgtttcctagctgacaagcagccaaataatcattcatattggaagttacttttttaacgtatttcgctcgtgggttatctgaggcaagtagttgtaggacagtaggttttcgaattgcaacaatggcaaattcactcgctacaaaaaaagcagtcgctgcaattaaaaatacgacaaaaaaatcattaaatacgtccattcccagtcctccttatccccattctataccctttttcatcgtttaaaccacaagtcagcaactgcctcaccatcaataatttcgcccgttttctcaaacccatatttcgcataaaatttctctgccacatggttatctggttcgtaagataagcggagtcttgcaggtttttctggcaaatttttcaccatttcgatgatttgctccaaagcatccccgccgtagcctttaccttggtgctcttttccagtcataaaacgtactagccaaaattcgccgtcatccgtatccattccgtacattgcatatccaactggcatattgtcggcataaatgacaatagaatgatacgtttcttcaaaacttgcttcgataatcgagtaccaattttctgctacaaatgttttctggtgaggatggacttgtaatttagccgtttcatgaaaattatctttcgttagcttttgtattgagaccatttttctaacctcctaattattaaaaaaagagcagaaaaaatccgctcttctagttaaatttccaatcagttagcttcgttacagcatatgttggctgaatctctttggttgttagtgcctcttttgaagtgaaaccagtatgaacgattaaagtatccataccgtagttgattcccgccataatatctgtttcgtagttatcgccaaccataattgcttcgtctttttgaacaccgagttttgcgagtgcttgctccataataattgattccggttttccgataaaaacaggcgtcgtttctgtcgcgacagaaacaaccgatgtaatcgaaccatttcccggaagcaaaccgcgttcagttgggattgccgcatcgccatttgtggagataaacattgcgccacctcgaaccgcaagagctgccttagcaaatttttcgtaatctacttctcggtcaagtccaacaacaacaaaagctgggttactagaagttatttcaaatccattatcagttagttcttgttttattccacgttcaccgataacataaaccgatttctcacgtttttgttcaagcataaattgcacagttgcttgtgaagttgtaaagacgtcacccgattccgcttgaatgcccatgccagttaaatgttcggctacttgatctggtgtctttgtagaattattagttacaaataaatacggaattcccgcacgttttaaattttcgataaaaatgattgcttcgggaataacttctgctccgcgatacattgtgccgtctaaatcaattaaatacgctttataattcttcaattccaaattacctcatttactattttacttttttaataacaaaataagcacagccaaagttgcagtattcgtaaatatattcttttaacgtgctaatcttgttgtcgtatgcggctttacggttgtcgtcttcaaagaaacctttcagtctaagttgatcgtaaccccagtcgcctactatataatcatatcgcccaagaatatcgctaaatcgttcattcaatttttcctcgtcaaaagcatcgcgataattggtgataatttcgtagtttaaatcttgaatcgtaatcgtcacgtgtcttcctcctgtccgtacatttttttgagtttccattttaaaatatctcggagtaattctggtgtatatacttcttttcgtttaatttgcttcactatcgggaaaaatggcgcgaatacaaacgtatcgtgcgtcgcaatccggtattcccgcgttttatcaatcggtttattatcaaaaagtgccacttgattttccgagtcaaaactagctctgtccatcaaaacggtaccaaaatactcgcctcggaaaccaaaacctcgaagcggaatgtcttgcagttctgctttctttcggtagattccgtcaataagtatttcaagttcctcaccagacatcgttaaagcaatcgcatttagcggatgcggtaacatttggtgaatatcaaaatccgtcacaatccctgcttcaaaatccgtcataaaaatgcccgcgttcatcacaaacgtttccgaaccagtccattcacaaacagcctcattcaaaatgtgcgcaatttccgagtcatcaaaccaattatgcgctaacttcccgggaatcgcaactactttttcagataattcctctcgtcctttatcaaagaaagcttgaatttctgccgtttcatttggagggattggaagtttttcggttgcaaaagttactgcttttttagagataatctgattattttcatctagctcaatagtaactttccctacatgctcgccccatcttccggcagcagccagtaatgcatttccttctatttttccattttcaagtaaatgatgggtatgcccacctaatataatatcaatttctggtaattctaaagcaattctttcgtctgtcggcaaaccgagatgactcagtaaaataactacagctgtgtccgcgtccaagccagcaatttgctttttaatcgcgctaattggttcttctactccccagcccatctcttcgtagtactctcgaaatggcgccgtcgcaccgataatagcaattttcacttgttctatttctttataaacaatcgatttcacccagtccggctgctcggtgcactctttatccgcgtaaaaattacagcaaactaccgggaaagctgcgtgctcgtataaattatccaagtcttcatgtgccaaagttgttccttcattattgccaaaagttactgcgtcatatggaagctgattaagtaagtccgtattcgcaagcccatttgtcccttcagtaagcggatgaacccggtctaaaaaatcgccaatatcaaaaaagagcgccgccttatattctttatctgcagctgttcttttctcttttaagaaattaaaaatacgaggccaatgctccaagtgactatgaacatcatttgtatgccataaagttaaatgtttcatcaatccacctcactcctcacatataactattgtagctcaaaatagctttttttacacgcagtaggaccgtttgaatcgttcaaccttcattttatgttatgataggatatattgttttaaagggaagtgatttttttggatattacgcaaacagtcgaaattcttctaatctctgtttttgcaggggttgttggctctttgcttgggcttggtggtggaattattgtaacgcctgccttgactcttattttcgggattgatattcagtatgcgattggagcgagtattatttccgttatcgcaacaagtagtggttccgccatcgcttatatcaaagacggcatcaccaatcttcgtgtcggtatgtttctcgagattgccacaacaatcggcgcaataaccggggctttcgtcagtggactgctctcggctacagccctctacatcatcttcggacttttacttctatattctgctttcaacatgattaaaaaggtcggttcagaatttcctaccaatgtgaaaccagacccacttgcaacaaaattaaacttacatgattcttattacgataaatctctacggcaaacagttgactaccaagtggcaaatgttcctgctggttttggtgtaatgtacggcgcaggtatcgctagtggcttacttggaatcggtagtggcgcatttaaagtaatggcacttgatgtctttatgaaaatgccgctaaaagtaagtagcgcaacgagtaatttaatgatgggtgtaaccgcggcggccagtgcaactgtgtatcttttccaaggcgacatccagcccgcgattgcagctcctgttgctattggggtacttgtcggcgcaacacttggaacgcgcatcatgcaacgtttaaaaagcaaagttattcggattatttttattcccgtcattttatatgttgccttccaaatgattttagaaggattggggtggatttagatggcagagaaaaaagaagaaatgtaccgcgtggagctaattgttagcgcactgctacgaatcggtgttgtccttagtgcgatcattatcgtttttggcctcgttatgctatttattaccggcgaaagtggctatcctggggaaacttatccgacttcgcttacggcgattttcagcgggctagggacgcttaaaccatacgcaattatgatgtttggtctgttttgcttgattttaacgcccgtccttcgtgtcgttgtatcattgtttacttttttgaaggaaaaagattacttatatgttggcgtaactgggattgtacttattattttggttattagctttttaattggaattaaggcataaaaaagatggcgctactcacgcgccatcttttttattctgaaaacaaatccatttgcatcggagccaaaccttgaaactcgacttggagcgccttttgtaaatgtttcgcattatcagcagcatccccgccgctgttattattaaatatcacgacaacttctttggacaatttttgtaaatgttccacatatttggtccactcgtttatttcttcctcattataacggtaaagcgtgcgaacctcgcgccattccggactactcgctttcatccaaccatactgattccgaccatgcagtcttactagcgtcatctcactatttgtctcacgaagcacaattggtacacttccagatccaacttgtggttcatcaacaaccgtatgaataaaacctaattctcgtagtaaatctaacgtcttttctgtattttgttcgctataccatgagttattacgaaattcaattgctacaggcaaatcacccattttcgaagcgatatatcttaaataagtcacattttctttcgtacaattaaaatacggtggaaattgatataaaattgcctgtagttttcccgtttcacttatcggcgcaatcatatccatataagccgtatacatcgcattttcgctatcaaaatactgcgaccattctttatgttttgtcatcgccgaaaaagcctttatcacaaaacgaaaatcatccggagtttgcgccgcccagtttgccgttgttcgcggagaaggaatcgcataaaaactcgtatcgacttctaccacaggaaaatgtgccgcataatcagctaatgttaatttttttgtttgtaataaagaatcatgatcactccatccagttaacccgattgtaatcatcaaccgccaccctctctatcgtttttgatttatgtttattataacgcaaaaaggagggagaatcttttaatttggttgttgctttaccttggatattttatgtcttatactttaattaaaaaaaaggagaaaacagatgaaaagacttattataatgacttcagtttttttcggaacgatattaatcggttcagcctttactggcaggaaaccttttgatggattaagtatatctttaataggtggattatctatttttatactatcttattttattgctggctttttaagtcgaaaaaaaacagctaaatttaaatgtaaataaaaaccccttcaaccacaaagctgcagttgaaggggattttttgttatatcaaccaatcgagccttccatttcaaacttaatcaaacggttcatctcaacggcatattccattggtaattctttcgtaaatggttcaatgaagcccataacgatcatttctgtcgcttcttcttcgcttaaaccacggctcattaggtagaaaagttgttcctcggatactttggaaactttggcttcgtgttctaatgagatgttgctgtttaggatttcgttgtacgggattgtgtccgatgtggacaggttatccataatgagcgtatcacattcgatattggaacgtgcgccgtctgcattacgaccaaaatgaacaattccgcggtacgttacgtttccgccttgtttcgaaatcgacttcgatacaatcgtagaggacgtattaggcgcataatgcatcattttcgctcccgcgtcttgacgttgccctttaccggcaatcgcgatagaaagggtcgttccgcgcgctccttcgccacgtaaatgtacagctgggtatttcattgttaatttcgaaccaatgttaccatcaatccattccattgtcgcattttcttcacagaaagtacgttttgttactaggttataaacgttatttgcccagttttggatggttgtgtaacggcagtaagcgcctggttttacaatgatttccacgacagctgagtgaagggaattcgttgtataaacgggagcagtacagccttctacgtagtttacgctggcattttcgtccacgataatcagtgtccgctcaaattgccccatgttttccgagttaatgcggaaataggcttgaagcggcgtatctactttgatacctggtggtacgtagatgaatgagccacctgaccaaacagccgagtttaatgctgcgaatttgttgtcgcttggtggaattacttttgcgaagtattctttgaaaatatcttcgttttcttttaacgcggaatctgtatctttgaagacaatccctaaatcttctaggtcttgcttcatattgtgataaactacttcggattcatactgcgcagatgcaccagccaaatatttttgttcggcttcaggaatacctagtttatcaaaagtacgtttaatttcttcaggaacttcatcccaagagcgcactgtttgttcagacggtttcacgtagtaagtgatgtcttcaaacttcagttctgacaggtcgccaccccaagtcggcattggcattttataaaattgctccaaagacttcaaacggaattctagcatccattctggttcttctttaatattcgaaatttctcttactactttttctgttaatccgcgttctgtacggaacacagaggtatctttgtcatggaatccatattggtattcgccaatttctggaatttcagtcatgtcgtatcctccttttcgctacttattttgttccttctttttcaaaaatcgctctctccattgctttccaagaaagggtcgcacatttgattcttgctgggaatttcgcaactccggcaagtgcctcaacgtcgccgtattcatcaattgtttcatggtcgtgaccttgcaccatttctgaaaattcacgggacatttttagtgcttctttctcggttttcccaataatgctttgcgtcatcatcgaagcagaggccatcgaaattgaacagccgctaccagtgaattttgccgcaacgattgtatcaccgtccatttttaaatgaagatgaatttgatcaccgcatgttgggttgttgaggtcgattgttacatcgctatctgggagctctccattattgcgcggatttttatagtgatccataatgacttgtctataaagctgatctaatttccggcttgtcataatccaaaatactcctttgttaacttgaggccatctataagcgcatcaatttcttcttttgtattataaatataaaagcttgcgcgagctgtagaagagacatctagccatttcatcaacggttgtgcacagtgatgaccagctcgaatcgcaatcccgtcttcgtccaaaatagtcgcaatatcatgtgggtgagcgccttctaaattgaaagtcactaagccacaacgtttactcgcatcttttggtccgtaaatggtaatgccttcgattttgctcatttcttctatcgcgtagctggctaatgcttgttcatgtgcgtgaatatttgcgagtccgacttctgccaagtaatcaatcgccgcacctagcgcaatcgctccgccaataatcggtgttccggcttcaaatttccacggcagttctttccacgtcgaatcgtataattcaacaaaatcaatcatttctccgccaaattcggtaggttccatcgcatcaagcaattcacgtttgccatacaaggcgccaatgccagtaggagccatcattttgtgccctgaaaaagcataaaagtcagcatctaaatctactacatcgacttccatatgaggcacagcttgcgcaccgtcaacgagaatgactgctccaaattgatgagcaattgctgcgatttctttaattggcgtgatagttccgagtacattagaaacatgagctaaagcaacgattttcgttttttcgtcaatcgtttttttggcttgttccactgaaatcgtgccatcttcttctagttcgatatatttcaaaaccgctcctttgcgtttagctagttgttgccatggaatcaaattagaatgatgctctagataagaaataactatctcatcgccagcttcaatatttgcttccgcgtaactatcaacaactaaattaatcgctgaagtagtacctcttgtgaaaataatttctgctacttcacgcgcatgaataaacttggctactttacctcgagctgattcataagcatccgtcgctcttgctgcaagtgtatgcacaccgcggtgaacgttcgcattatcaaattcatagtaatgagttaaagccgcaataacttgttttggcttttgtgaagtggcagcattatctaaataagctagcggtttttcatttatttcttgagctaaaattggaaaatccgcccgaattttttggatatcaatcatttagcgcactttcccttcgattacttcacgaagcatcgtttttacactttcgattggtaactgacgaacaacaggatccaagaagccatgaataactaatctttctgcttctttttgagaaatcccgcgactcatcaaatagaataattgtagtggatcaacgcgtccaacagaagccgcatgtcctgctactacgtcattttcatcaattaataaaattgggttcgcatcaccgcgcgcttcaggactaagcataagtacacgtgattcttgttgtgcatctgacttagaagcgccatgtttaatgtgaccaattccgttgaaaatagttgtcgctctttctttcataacaccatgggataaaattgtaccattagaagcttttccgtaatgtgtcacgcgagttgtcacgttttgcgtttgcttcccgcgtccaactgtcacagttttcacatcagcagaagatccgtcacccattaggttcgttacgttctcgttgatagtatcgccatcattcatcagaccaagtgcccattcaatttggctgtctgttccaatgtgtccacgacggttcacatatgtcgtaacgccacttgcaagattgtctacaccaccaaaagtaatgcgcgcatttttctcagcgattacttcttccacaatgctaacaatccctttaggtgcgttatctaccgttacgtagttttccacataagtgactgcgctattgtcatccgcaacaagcaacacatggttaacaagtggagattctgctttttcttgtacaaaaacagcttgaattggcgctttcacttcaacatttttaggaacgtaaaggaaaatcccaccgttcactagtgccgcatgaaaagcagtcagtttattttcgttcacttgaactgcatctgtcatgaagtattttttcacaagttcaggatgatttttcacagccgaaataatatctgtgaaaataacgccttggtcaactagttcttgttgcaactgaagtctcgcaggtctttcatccatttgaacgtaaaaattggcttctttattatctaaatcaactaaattcgctactttttccggtaaagtttcattcgttacgccttctttaaaaggtataaacgtctcaaactttgtgaaattccagcgagtaatttttgttttatccacaaaaggcaagtccagttccccgtaggctttaaaagcattgcgacggatatctaaaaaccaatccggttcattcgcattacttgaaaaagcgtggataaaatcatctttaattgtcatattttctgccatgattttaacctcacttccttattgttggtctactgcttcttcttcctcaagttcgataccaagctcttgtttaatccagtcataaccttcagcttctaaacgtttcgcaagttcagggccgccttctttaactactttaccttgcatcattacgtgcacaaaatctggtgtaatgtagttaagtaaacgttggtaatgggtaatgattaagcagccgaaaccttcgccgcgcatttcatttacacctttagagacaactttaagtgcatcaatatcaagaccagagtcaatttcatctaaaatcgctaattttggctcgatcattaataattgtaagatttcattacgttttttctctccgcctgaaaatccttcatttaaataacgttctgccatttcttcgtccatatctaaaatgtccattttggcatctaatttacggatgaattgcattactggaatttcgtcgccttcttcgcgtcggctattgattgctgcacgaatgaattcagcgtttgtaacaccactaatttcacttggatattgcatcgctaagaaaaggccagcacgagcgcgttcatctacttccatctcaagtacatcttctccgtcaagcgtgattgatccttgtgttacttcatatttcgggtgccccataattgctgaggacaacgtagatttacctgttccgtttggtcccatgatagcatggatttcgccagttgaaatttcaaggttaacgcccttcaaaatttcttttccttctatttcaacatgtaaatcttgaatctttaaagttgccataaaaaagtcctccctagtgtaaaatttgcataatcctagtttagtataattctaatctgattacaactataaaaaccagcactcttcgcattctccccttcattctactattaatagccgttttttaccagttttcgtgcattatcactatttccattttatttgagaatccatgacataaaaggaagagcgctctatatcaatagaagaaaggtccttttttactataaaaaaggattgtatatcttatttagatatggtattgttgtaacgtaacaaatttgcaacataataacttatttgtaataaacgattatttattgaaggagaatttaaaatatgaagaaagcaataatggctctgaccatctttgtattgcttttagccacattatccgggtgcagctcccctaagtccgacttcacatctactttaaagaaaacagctgaaaataaacaatttacaacgaacgtcacattccaagtaaataacctatctgataactacattaaaaaacttggctctgatattgacttaaatcaacttaaaaaatctaacattcaatataaaatttctgtagatagtgattcttcctcttcctatagcgcctattcgcttcactggaaaggcaaagaaccacttgatttaaccttacacgcgctccaaaacagtgaggacgggaaagcttatatccctgtagctgatatttatgacgcagcagacagtttttcaagcctactatccgattcagcagctcagattttcaacaaagtactcgcgcaaaataaagacttagaatctaaatatctcaacgtattcgagacattccaaaacttctccaatcaaacaattgattcagaaaccgttgatcgtcaagcggaagaattgaaaaaaattgaagaagccagtggtatcgcaatttatagctatttaaataacttagatgacaaacatttcacttccaaagataatggagatattgtattaaacctatccaaaaacgaaataaaagatttagtcaatgacgtctttacagcacttgataatgacggaaacatcatcacacttctttcagaaattgatggtagctcgcaaaaagaagctcaaaaaaaatggaattccggtgaaaaaagtgttcgttcttcactaaaaaaccttacttccaataaaaatcaaacactcgatttcaaattaacgttaacaccagatagtaagaaaggttttagtaaagccgttattactacaaactttgaagatagcaaaacaaaagatttaatcaacttaacaacaaccgtcgatatgcttgattacgaaaaagttcctccaatgccagaaggtaaagacattgtttctaaaaaagaacttgataaagccatttctgatggactgaaactatatttaagtagtgctaattaaaaaaaatccttttaccaaatcggtaaaaggatttttttgtttacttatcaactggaacaactgctccgtcccattctttcgtaatgtaatcttgaatttcttttgaatgtaacaccttaactagttctttaatgtttttgtcgtcttttttcttgtcagtagttacaacaatattagcatacggagaatctttgctttcgattgcaatagcatctttcgaagggtttaagccttggtctacaacaaagtttgagttaatagcgacaacatcgccttcttcattattatatgcagtcatcaagtaagctgggtcaaaatcatatttgaatttcaagtttttcggattatctttaatgtcgtcaaatgttgcatcttgtggtttcacgccatctttaagtgttaaaagtccattgtctacaaaaatcccaataacacgcggccagtcagattttgagttagaaagtaaaacttgcgcgccgtcttttaaatctttaatatcttttacttttttagaataaatgcccattggttcgatgtgaatagcaccgacatcagcaaatttgtaacctttttctttttcttctaattcaagatatggtttatgttggaagtagttagcatctaaatcgccttcttctagggctttattaggcataacgtagtctgtatatttaacaattttcaagtcaatccctttatcttttaagataggttttgcttgttctaagatttgggcatgaggagtatttgacgcacccactaccaatttattatcgtctttactagatgaagctttatctgaggagccaccgcaagctgtaagtactaaaactaaacttaatgtgaaaattaaaccaagaacctttttcatgaaattctctccttttttgcggggattccgcgttttttttatataaatttcttcatatacattggttagcgtttatcggttcgttttgttaggaagtcgccgataaattggaaaataaagacgataattaaaataataattgtcgcaagtaccgttacatcaggttgtccacgttggaatccttcaagataagctgtatttccaagcccacctgcaccaatgacgccggccatcgctgtgaatccaacaagtgaaattgctgtcactgtaataccagaaataatcgctggtaaggcttctgggatgagcactttaccaataatagtaaacatgttcgcacccatggatttagcggcttcaataacgcctttgtctacttcacgaaaggcaatttctaccattcgaccatagaacggagctgctgagataattaaagctggaagtgctgctttcggtccaattacggttccgactaacgattttgtcatcggtaaaagtaatacgattaaaataataaaaggaatggaacggaacacattaacaaggattgctgtgatccagtataaaatgcgcgctccggcatgttttttattattggttaaaaatagtaataatcctagcacgattcctagtaaaaaaactgcaaataatgaagtaagtgtcatatatagcgtttcttgtgtggcaacccacatcatttgaaaatcaacatttggaaataactcttgtaatttcgtcatcgttctaacacttccgtttctactttaagttgacgtagctgtgttagactggcttctatcgcttcttctgtgcctagaacttggacatacaatgttccgtatgcaccgttttgcgtttgagttaagttcccatgaaggacatttagcataacatcattttcttttgctacttgagagataactggttgagttgcattttcactcatgaagagtagtttaacgattttaccttctgcgtaattatcgagtaatagatggattagttcttccgtttcgtctgaatcagttacttggcggacgaaacgctgcgttactttttctttaggatggcggaacacatctagtacgtcaccgagttcagcaactttcccgttttccatgactgccacgcgattacagattttccgaataacgtgcatttcgtgggtgataacgatgatagttaggttgaggcgtttatttatgtctagcagtaattctagaacttcatcggtcgtttgtggatctagtgcggatgtagcctcatcacaaagcaatactttaggattattggcgagcgctcttgcaatacctacgcgctgtttttgcccaccacttagttcagctggataggcgttttcttttccttctaagccaacgagtcgaattagttcattaacccggaaacgtcttttttcaccgcgaacaccagcaatttctaatgggaacgcgatattttctgcaacggttctagaccataataaattaaaatgttgaaatatcattccgatttgttggcgcgcttttcttaatttactaccacgaatttggctaattagtaggttatctacttcaacagacccttctgttggtagttctaatccattgaacattcggattagtgtacttttaccagcccctgaataaccaactactccgaaaatctcaccttgttcaatttctaaatcgacatggtcgactgcgagaactttgttatttctggacgtatattcttttacgacgttctgtaacgtaatcatctctatcaccttttctacattctgatatacaaaaaagccttcctgctaatgagcagaaaggcagcattttttcaaatgggctaacttccttctcatctttcagaacaaatcgttgttctgcatgacttagcaccttaaacacataatgaattattgtttaggttgctgggtttcacagggcatttccctccaccactctggataagatttctacatattattatatcacttcatttgtgactatagtgacgtttcttgttttttcatattaccttttccgtcacactttgtcaataacttttttatttatacgcatctatttgtaatttacttcactaataatactattttctcccgaatcttcctggctagctaactgagaggctattttaatctgagctctattttgatatttaagttcgctactattgacttgaattatgtacataaataccgcaatgaccgtgatacaagcaacaacaattaaaacaatatgttttttcatttttctctcctccgtgatttatattctactgaaagaacataaatcacaaggaaagaaacatttaagaatttttaaagattaaatgagcggcaatttgacgataaaacttgttttgcgatgtttgctttctgcggtaacaattccgccgtgtttttcaacgatagacttagcgattgcaaggcctaagccagtacccgttgttgtccgatttttatctactttgtaaaaacgttcaaatagataaggtaaatcaacggttggaatctcttcaccatagttagtgacccgcacaacagccatattatcttcttttttcgcgcttacatcaatttgtttatttccttctccgtatctaagcgcattggaaaataaattctcaaacaaacgcataatttggttaccatcgccaccaatgatgagtttattggcatcaaaatgttcgattatctgcatatttcgttctgcagctcgtccgtcatattctgctactaattgtctgagtaattcaatgatgtctagttcatctttttttaattggtaatcaacactatcaagcctagtataagagaataaatcatcaatcagtttatgcagatgacgcgcttttccgtaaacaagttccgtataataacgcagctcaatctcatcacgataacgatcctcatgaatataacttaaatatcctaaaatcgacgttaaaggggttcgcaaatcatgtgagacattcgtaatcaagtcattcctagcttgctgcgcctgttcttcctttttcattaatttattttgtcgttcacgcatattttcaatgtttcgctcaagttcttgaatttccgggacaaaactttctgtatcaaccggctttccatcatttaaagcaaaattaatcgttcgtagttgtttttttaatatccgctgacgcatcaatcgataaaagaatgcaaagaataaacaagcaatcaaaaagataattaaaaacttcagcgataacatccaaaacgactgcattatccgagtatatttattcggcccaaaaagttgaaccatagattgcgtcacttcacgtaaaaacaaagaatcatcacgaatagaaatactccacaaataaatagtttggacagtaatcaaagcaaaaacccaagacactattgcaaaaaaagtcgcctgccaaacattcatcacatggctaattttcgtaaacaacacttccagcctagatttcaattttgtaccctactccccatattgtcttaatcacattttctccgcccatagcatctctcaatttatcgcgcaagttgctaatatggaccatgaccgttttactcgctccgagtgctttctcctgccaaattttctcaaaaatatattccgaactgaaaacacgacctggttcactcgctagtaaaaataaaatatcaaattctgaagtagttaaatgaagttctttttctccaacagttacaacatgaagcccgcgatcaactacaatgggtccaataataaccttatcttgactaactggctccgcttgactcatttgttgcatgcgtcttaaaatcgctttaacgcgaacggaaagctctaaaggattaaacggtttgaccatataatcatccgctccagttaataatcccataattttatcattatcttccgccttcgcgctaagcatcaaaattggcgttaggataccattattccgcattaatcggcatacttcaaggccattcatttctggcatcattatatctaaaatcactaatgttggctgcttttcttgcactaaacgccatacttccgcaccatcataagcttgataaattgtgtatccttcattttgtaaatataattttactaaatcaacaatttctttatcatcatcggcaatcaaaatagatgttgtcatactcattgtcctttccattcttatttctacctattgtaacactttagaaacaaatcgaatagaaagagctgatttttaatttctagttagcactcgctcttcttcaggttctaagtgaatcaaaacttctgctttcgcgtagaaattcataatctctgcttcaatttcatcacaaagcgaatgagcactttcaattgtcatcgtggaagatactactaaatgaaaatcaatatattcttccgcccctgctcgtcttgagcgaaaatcatgaaattcaataaatttatttttatgcgctaaaataatctttttaatcgcctcttcttcattatctgaaagacgtctatccattaatggtggaaaagattcttttaaaagcttaaatgcttcgtacataatataaaatgccgttaaaatagcgataactgggtctaaccacaaccagccagttatgtatactaaaaataaactaagcgcaataccaagcgatgtgaaaacatctgtatataaatgtagcgcattggatttcattgcaactgaattggctttaattgccgctcttttaataattcgtgacacaataatattaacaatcgccccaaaaagcatgacagcaataccgagcgctggaaatctaatttcatgcggatttaaaagtttattaacagattcaacaataatccaaatacccgctacaaaaatcaataaagtttcaatagtccccgcgatattttccgctttcccgtgcccatatggatggtcctcgtctgcaggctgattcgaaattcgaatagaaaagaaagtaatgactgatgcaaataaatccattgaagagtgaattccttctgaaatcacagctaccgatcccgtgaaaaagccgacaattaatttaagtacgacgataacaaaattactacacaccgataaaatagtaaggttagaattgttcatagaaaagcctccgatatgtttatgtttcactaaaaatttctctttataaaacactattttaacaactcgaattatcttaccacgagtagccaaattgtgtctatagcaatgtttttagctaaatgcagttctatatcagaaacgaaacttttttgcgcacgggcaaaaattaacacagaaaaaatccctgtatcactcactatacaggaattcaaaaatagctgttgcatcatgtaatttatacgttaaatcctttggttcgccgttcttaaatttcactaacgcggggactgacgtgatttccaagctttgagcaatatctggcacataattcaagtctacttttgtgacgttgctatgaatactgtctgcttctaaaaccacgtctactaagcggcttgctatctgacagctgccacacattggtgtaaaaaagaaaacgacaaaatccgcgccatcgttttgcgcctcactaaaagtctctttttcccaagtttccagaaaaaacgcctcctatcaaaaaaagccagcttcggttatcccaagccggcttctaataaattaatctaatcctttttcgtaatcatcacttgataaaagagcagttacatccgcttcttctacttcagtaagttttaaaatccaaccagtgtcatacgggttgctattaattagttctggctcatcttctaatgtttcattaacagcaactactttaccagttactggcgcataaaaatcagatactgttttaacggattcaatgctaccgattgaatcaccttttgttactgtatcgccaacttctggcaattcgacaaatacaatatcccctaattgatcttgggcaaagtcagtaattccaataatataactaccgtcttctgctttcacccattcatgttcttctgtgtacaataagtcttttggtaaactcattttaaaactcctccttttacttgcaattatctatattgactatttccaagttgcttcaaattcttcttctttgaaaccaagcgttacttctttgccgttagttgtaagtgggcgtttgattaacatgccatctgaagcaagcaaattataagcctcttccggtgaaagtgtatcaagcttatcttttagtccaagttcgcggtatttaataccacttgtattaaagaaacgacggattggaagcccgctagcttcatgccatttttgtaattcttcggcagttggggtttcagtcttaatatctacttcgttaaaatcaacatgctcattttcaagccatgcttttgctttcttgcaggtgctacattttggataccaataaaaattaatcattttgcctctccctccgattgcattctattactatcatagtgcattttttcttaaagtacaaatagcaacccttagaaaaaaacagagattttgaaagcgcattcatatcagttcaaaaaaatacaaaagccacttcgacttctgtatttttcttttaagatgcgtgattttcttctttcacttcaaacatcgatttcttaaagttaaaccttatcccgagaacgagcccgactgccatcatattcccgagcagagcactaccaccgtaactaataaacggaagcggaatacctgtgattggtaataaaccaatattcatgccaacattttctagcacgtggaacattaacatcattacaacacccgtacagatatatgaataaaatggaacgcccacatcaagcgccacccgaataatttgataaattagtaagaaataaatcgccagtagaatactcgctccaataaagccatagtctccagctacaatcgtaaagataaagtcattatgattttcaggaattgcgatggcatcatatcccgccccgtttccagaaatctgaccagaaccaattgccgtcatcgctcgcagcacttgatagcccccgccttgagggtcattttccggatttatccaagtcgtaatccggtcaaattgatatggtttaaaaccaagactcgttagccaattctgatgataaataaccatccaaataagcgtagtaccgattgctgctatcgagccaaaaagcggtacgataattttccaagtaatacctgaaataagaatcatccccgacataatggcgataaatacaagtgctgtccctaaatcgggttgtagcataattaaaataagtggcattaatgtaaataagccgattttcagcagtaaccaagcgtcataactaaagcgatgaactttatacgttcgattatgatcccagattacttttgccaatacgataattaatattacttttacaacctcagaaggctgaatattacctaaaaatggaataactatccaactcttcgctccttttacttctttcccaaaaagtaaaacaaacacgagtaaaaacagacctaacccataaaagtaataagcccatctcgtgagtcgatcataatccaattgcatcacgacaataattgcaaatgtcgaaaccacaaaccacatagcttgttttacaacaaagtttgcatcatattgattatttgttaattgcgcactataaatggacaccaaactgattatcataagtaacatcattgataaaacaatcccgtaatcaatgcgtccagctagtttattttgttgattcattatttaattactccttactggttggtttgtgtatactaacgctttctcccaaacagtttaaaaaagaaaatcatacgcgattcccttttcctaagttaacttctggggcattatatctcgcagataacacgagtccaagtgccataaatgcgccaagaagagagcttcccccataactgacaaaaagaagtggaataccggtaattggaagaagaccaattgtcatcccgatattttctaaaacgtgaaataaaatcatcgagcaaacacccgtacaaatatacgaataaaaaggaatgccaatgtctaatgccactcgaataatttggtaaatcagtaaaaagtataacataataagtacgcagccaccaataaaaccgaaattcccaccaataatagaaaaaataaaatcattgtggttttctggaatagcgattgcctggttgccaataccatttccttgtaactgaccagaaccaatcgcctgcattgaacggagcagttgcataccgtccccaagcggatcttcctcaggtctaagccaagaagtaattcgtttaaattgatatggtttaaatcctagtttttgtaaaaaatcttgattgtacataactaaataaattaacgtcccgcctagtaaagcgaccgaactaaatactggcactaagattttccatgtaacaccactaataaagatcattccgatgataatagcaataaacactaaaattgtacctaggtctggctgaagtctaactaacccaagtggaataatagaaacgatgcctattttaagcaataattgtatatctaattttaccgtgtgcagttgatattttttgttatggtcccaaattactttagcaagcgcgagaattaagaagctcttcattaactctgaaggttgcaaacttccaagtgagccaatactaatccagcttttagaacctttacgctcatcgccgacaattaatacaagcactagaagtaaattcccaataccatacaagtaatatgccgcccattgaagccgatcataatcgaaaaaaagtacaataacaacgactattccagtagaaataacaatccaaatagactgctgcagtaagaaattatttgtgtactggtcattaacaagtcctgcgacataaatagccattaaaccaatagtacaaagcaacatcatcaagaatataatcgcgtagtcaactcgaactgccttttttctatttctagccattgctttccgtcctttatgtttagatttaaatgtaaaaaagctgctattcttaaaaagagcaacagccttcatctattataataaagtttaccttggataggaagctttttcaccaaattctaatcttctttctgttttctttaatattcaaatctagtcgaagcaagcggatgaatgtgctgttttccatctttttcagtaatatctgctgtaatatgaaagacatttcgcaaaagctccgttgtaaaaacttcttgaggcgtaccatttttgactaatccaccattttcgcaaacaaaaacataatcactgtagattgcagcttgatttaaatcatgtaacactaacacaatcgttaaattatattctttatttaaatgaactaacaaatctaaaagctcaagttgatgggcaatatctagatatgtcgttggttcatcaagtagtaaaataggtgttttttgcgcaagagccattgcaagccacgcacgttgacgttcaccacccgataacgagtgaagtggtcgatacgccagattttctaagttacacactttaattgcccactgaataaccgcctcatcatcttcttgtaaagtagaaagccaacttctgtgcggcaaacgtccataagccaccaagtcatgcaccataacatcaactaaaccttcaggggcttgagataacatcgtcattttcttcgctaaatctttagaaggaatatccttaatatttttttcatcaagcaaaacttctccactatcaggtgtcaaaaggcgcatcatcaaacgaagcatagttgatttacctgaaccatttggaccgataagtgttgtgattttaccttctggaatgcgtgcactcacgtctttcatttcaaaatctcttttacgtgagaaagaaatattttttagttctaatgcaggtttcatgaagcaaccctccctctttgaagtaggaataagaagaatggtgcgccaatcatcgcaagcaaaatcccaactggaagctcaatcgacccaaaccaacttctagccgctgtatcagcaaaaccaactaatagtgcgccacctaaggcagataatggcagtaaatatttgtagtcattgccgataatcaaacggaaaatatgtggcacaaccagcccaacaaagccaattaatccagctacactcactgcgaccccacttaaaaatgccgctaacatgataatgaaaaaacgatgtcgttcgacggaaaaaccgagtaattttgctgcatcgtccccaagtagcaacacattggaagagcgaatagcaaaaccacttaaaacaaaaccaaccaacatataaggccaaatcatatccaagtgataccaacttttcccagaaagcgttcctgtcatccaagaaataacactttgaacccggttactataaagcaccataactccagaagtcattgcgccaataaaagcattaatagcaacaccagataaaatgacacgtaatggagaaacgccacgatcccacgctaataaataaattaaaattgccgtaccaaaagcccctaaaaatgcgccaattggaacaaaagaagccaaagcaggaaatgctaacgtcattaaaattgctacaaatccgccgcccgctgaaaccccgattacacctgggtcagctaatggatttcgcatcacgccttggagcaagcaacctgctattgcaagtgcagcacctactaagaatgcaatcaatagtcgtggcaaacgcaaattccatatcaattgattcgcaaggtcactcccgccgccagtcaaagtttgccaagcgtcactatatgtaactttcacggacccagtagtcagcccgtagaaaaaagctaaaataagtaaaacgattactacaataaaagttatccgtctacgttttcgccgcggatcatgcgccttcacagttgtcattagttagccaccttatttatttcatctgtcatataatccaatgcttgatcaattttcattccgggatttgttccgaaaagttctgctggaagtacgacaatatgatcatttttaacggcgcttgttgaattccaagcttcattttgtttcatttcttttttaaaggctgtttctgtttctttttcatctccgccgtgaatcattaagaaaatcacttctggatcagcagcaacaattttttcgacattcatcgaagcatattgcggaaagttttccacacctttaaaatctttcgccacgttttctccaccagcgatttctaaaacgtttccgcttaatgaggatggtaacgctgcgtagttacttcctggagctccgagcactagtaaagcgcgtacttttttaccttgctgtttttgcttcacttctgctacttttttatcaatgtttgcttctagttcatctgcttttgtttctttacctaaaagcttgccaagaacggctgtctgtttttttatttcatcgattgaattcgccccagttagcacaactttcggtcctacgccttccattgcaggcacatcttttaagttttgttctgaacttgctacaatagcatctgccccaagagaagcaattttctctaagtttaaatcatgcgtattgcccacttctgttgcttttttggcgccatctggaacaccacttgcatctgttgtttgacgaccaactactgtcccaccaagcgcataaataatattcatatctgcatttgtaagcgcaatgattcgttctggttttttatcaaaagaaacatcacgaccagccatatccgttaccgttaaggctgcttgcgatttattttctgtttttactgtttcgttattcgtatcagttgcagtatcatttccacacgaagcaaggagtagtgcggctgttatacttaacgtcaatatagttattttcttcataattcccctccacaatactgtccttttcattttactaaattataccacgatattcaaaaagtcggacccctaattgagaattattttcatctatatccaattagtcgatattttcacgttaatactttataattaaatcaaggaggcgatgaaaaatgactgataatctttttcctaatctagcgcatgaaaattgcaaagaaccgatgcccccagtcacaacagaacaattcaaagaagcagccattctagaaaagaatcgcaagcttgaagaaattttgaacatcgtggataaaaagaaacctagtataaaaaaataacgaggacctgttcgcgcaggttctttcttcacaccttaattccgagttaactcataagataagttatatttattttatttcactaaaaaatcatgtatactagaaaaaaagataggtcaggaggcccttacattggctattttagaactaaatttcaaatcagaatgtttagccatgcaaacaagtgtaacggtgattttacccgaaacagaaacactttaccatggttcaattcctaaatataaaacattatatattctgcacggcttgtctaacaaccacactacttatgtgcgcaatacgaatattgaacgttatgctaccgaaaaaggactcgctgtcatcatgcctgcagcagaccatagtttctattctaatatggttcacggtcgcgattttttccaatttgtcagtactgaacttcctcacgtgatgaaaaactggttcccactttcggacaaaaaagaagatactttcatagctgggcattctatgggtggttacggtgcgttcaaagttgcacttactttcccagaaaaattccaagccgctgcaagcatgtctggtgtcatggatattaattatatcattaaagaagattgcttcgaaaatttcagcacacgtgccatcactggagaaatgactagccaaactggtacggaaaatgacttatttcatttattagaaactaatctaacgaacaacgtggagttaccagctcttttccaaaattgtggtacagaagattttctttatgaagacaatcttcgtttccgtgattttgcgcttgccaaaaacgctccactagaataccgcgaaggtcctggtgatcatgattgggatttttgggataaaagcttaaaagaaattatcgactggcttccactttaataaaaagaagacttggactcgcatccaagtcttcttttttaatgcgtaaatccgtaagaatcgtttcgttccttatcatgataaagcactctagcatgttctaaattgtggagtgcatccgcgaaatcagctgcaaattcttctgccacattataacctaagtccgcccggcaaacaaaccgctgaataatcgtatcacttaaatcagccggcagcggataagccggaacttgccagcctttcataagaagctggtccgcaagatcatagagcgtccactcaacatcaaggtcatctttcaacttataacagacaatcggcaaattagagccatcattaataatttcaaagtagccacttttttctaccgtttttgagagatatagtgctgttttctttgttttttcgtgaatttctcggtagccttcaaaaccataacgcaagaaattataatattgaccaataatttgactagcactacgcgaaaaattaatcgccatggttggcattgaaccacctaaataactcacttcaaaaataagctcttttggtaaatattctttatctttccataaaatccaaccaacacccggataaactaagccatatttatgaccagaagtattgattgaaaccacatttttaagcctaaaatcccacggtaattctggatttacaaatggagtaaacattgcgccacttgccccgtcaatatgaatcactaattgatgctcgtttgcttcattataagcttctactttttcatctaataaagcaatatcatcgaattttcctgtgtaagtaatacctaaaatcccaacgataccaatcgtatactcatccactaactcaaataccttctcaacatcaagacttagatgctctttatccattggaacgacacgcatatcaacatcccagtacacacaaaatttttcccaacacacttggtagcctgatgaaataattaaatttggccgtttcgcttgaatatctagaccacgtttttcagcattattacgccaacgaaatttcattgccaagccgccaagcatacacgcttccgaagaaccaacagtggaagtgcctagataagacatttcttttggcgcattccataaatccgctaaaatattaacgcagcgattttctagttctgctgtttgtggatactcagatttgtcgatagcatttttttccagtgtttctgccatcaatatttcggcttctttttccatatatgtctgacaaaaagtcgccaagttctgtctcgcatttccttcatccatcagctgatctttcactaattgataagcaatgcgcggttccattggttccttttttaatacgtatttcgggatgctagtactttcttcttcagatccaaagagcgggattcgataactttcatgttttcgcttgtcgttttcactataaagcatcttttttcctcctttaaaataactgatcatctctttcaccaatacccattaaagcaaataggcaaaccgttcaatttttcacaagaatttgttatactacggtggtacataaaaggaggtttgctatgtttgatttaattttcccgcttttattaattattattggcattttttacagagttaatccacccaaaaataaaaatggccgctttagttaccggacgaatgcttctttaaaaaacgacgccaactggaaaaaggctcatcgattgcttggaatttactggataatcattggcgtgtgtattctagttttttcactgatacttgcatttattccaatgtatgccatgattcgcagctccattttattaactactagtgttttcgcagtgttattttcggtcatattagtagagaaaaaattacaataaaaaaagcaccgcgataagcggcacttttctgtaatccattacatataagtccaaaaaaattattcttcttcttttgctattgtgtttctttcagtaacgcggtaaatatgaattgcgaggtaaacacgttcgtctcttgttaattccgtatgatgcgtattaatcagatatgcatcaatttttttcgtacaattaaaagcttctggatacttaatttgcacttgttcatataaaaagtcatcgccggaatcgacaatttcttttcgaagtaaacgttgtgcgaaatactgtaaatgagtaataaaacgtgtatagttcagtgaagtttcatctaaaaccataccataatgatacgtgacaatgcttaaaatatcttgaacaatttgggtcattgctactgtcatgtgcatttgttgtccgtcttgtctcgcatttacaatgtggagagcaataaaaccagcttcatcttcgtctagcctaattcctacttctttctcaataaaatcaagggccttcattccaactaaatactctgcgtgataaaatcgttttatttcccacaatagtgcatttttcaagttaataccttgattataccgtgatactgcaaaattaatatgatctgtgagagttaaatagatattatcgcttaagtctgtttcaagtgtttcttgcgcgtactggacaacatcatccgcgatacgtaaatgtttcagcggaatctcactaagtaattctgaaagcttttctgaaagttcgtgtgtttccattacaaatgttttttcaatcttggatacctccacctcatctccaagtttcttttgaaaagcaagaccacggcccatcactacagactccttgccacttttaccctcggcgattacgacattgttattcagtatttttttgataatcatgcattttcacctctttcaaaagaaaaaaacccaaactaattccaacgctattaatatcaaaatagcacttgaattaatctaggttttgcctgcctcagcagtaacaatcctattcttttctctaacattatagtacaaaaagaaaccgattacaaggggtatttttgatattcaattttggattactttatatcttccctactttaacataacttattcattgacaggaagttttctgcatgctatttttggctggaggtgataaattatggcaacacgctcggaacaaatttttattaatttgcctgtaaaagatttacaagcaaccgtcgcttttttcacagaacttggctacgaatttaatcctcaattcacagacgaaaatgctacccaaatgctcatcggagaaaatattttcgccatgctcttgaaagaagatttcttccagactttccataaagaaggcatcgctgacacaacaaaagcacgcgaagtcctcatcaccatcacccaagatagccgccaagccgttgacacactggtcgatcatgcgctaaaaattggcgcaaaaccagcaggcgaaacacaagactacgatttcatgtatagcagaagttatcttgacttagacaaccatctttgggaaattgcttatttagacgaatccgctttaaaataaaacaagaaccgctggaattcatttgattccagcggcttttttaaatttccgtattttcttcatagcccattcatagtggctcgttgtgcttgaaataaaaatagcacctagcgacgttgtattcgtccacttataatatttttttgtaaacagttcttcattcgagtgttccgcgataatttccatttccgcatgatgcgttttatttagtaattccatcgccgtctctaaatccgtttcctggtacttctgccaaatgaccaaattcagttctggcgtagtcctccaagtatagccttccgccggcataaaaggtttatcgcccctcatcccaacctggtaccaatcaagcgccatattgtgccactcatgcaaatgcaccacaacgtcacgaatattcttatccctatcctcaaacggaaacgcaagctgctgtttttcttttggaatagagtcaattaaatccaatagcttttgataactttccgcactttgttgaagcaattcttctttattttttggtctcgccatgaaatattactcctttctaacaaatatgtaagtttaaaaatccatttcgttgccttttgcaagggtttgtcccgctcttttcttatacaataagtgtaataactcagcaaaggatgattgacttgaaaaaaatcgttatacttattataagcgtactattacttggtggaattattggtggcgtatattactttaaaaatgccaacaaaattggtgcagatgcttcctatgttaaaattacaaaagatcccacaaaaagtaatgaaataagcttcaacaataattatactcttcctgcatacgacgaaaatggtaaagagacagaagttactttttctgcagataaagaattacgtaaaggcgcttatttaaaactttatattaaagaagacaaaggcgtaacttcatttgaagaagtgcctgaaaaagaagtcccagctaaagcagctgaaaaacttaaataatgacagaatctcctccttgtgaggggatttttttaaatagaaatataaacttctatttttccattcgtatgataccattcaaaatctgttttataagcgcgctgtaattcactatccctcgcccagatttcttgccaaacttccgccacgcctttatgattcgtattatctacagtaaatacgagatattctcctgcttcaatttctgtatttttttcttcatcccagtcactagttcctactaacaaatcatattcacctgtaaaatcacttgcataattactatacaccgcaaaaatatctccggctggcttttcaaccatgacttcaccccaaagttctgcaattggactaaaatcactattacttgtacgtatttgctttccattaatcactttattttcttgcaacttcattgtttgtcgcctcctctaacatcattatagcgaacaaaacttgacagctatctgtcaacaattcaaattaaaataaagtttttccacttcagctttatattctttttgtagcgaagcaggttctaaaatcttcactgcacttccaaacatcaataaaaacggtataatattccgctcagggtcatactgaaatcttacacgaaccaaatctaactccatttgcatttcttctaataaaaagtaatccagtaattttccaagctggtttttcggaaactctaacacaattttttctgttacttcagcttgtttttggtcttcttctattttcatactagttttactcgtttctttcaaagacgttattcttgttaatttaaagtggcgaatggctgctcttttgtgacagtatgcttctaaataccaactgccatccattaagtttaatttttgaggtgaaatttctcggtttgtttctgttccgtccatcgcaatatatgttatatctagctgttttttcattgtaaaagctttttgaatataggcgatttttcgttttacttcggcctcaatttgtttgcgatgttgtgtcgctgaatcaaagaaaatataattgctagttggtttttccgtttgtaataaagtgattttttctcgtaaagtttcttggctatcattcaacataaattccgaacgcgcctctaaagcttcaagcaaaatccgcttctcttcctccgaaaaagtaaacgtcgctaatttatatgtatcaagcatcgtaaatccgccatttttccccggtaaagcaacgactggaaatcccgcataaaggagcgtatccatatcgcggtaaatcgttcgtgtgcttacctcgaatttttcagcgagctcacttgctagtacttttcgctctaaaatcatgactaatattgctaaaatccgctctagtttcatcccaaaacctccagcccttttagccttattatagcatgtattatcggtcaaaaacccatgcatatgtgatggataaaacttcgcgcatcattcctttgtacttggcaggtgtccgagattttgctggaagaccggttgcatttatcccctgacgttttgctagcattagcgccctatacatatgatagtcacttgtcacaatcactgtttttcctaaatcaaatttttcattgctatatttaatattttcttccgttcttttggatttagtttcctttttaatccgatttctcgcaatgccttcattaaccaaatattcttccataaccgcagcttccgtcgtgctttcatcagcaccttgcccaccactaacaatcacctttgcctttggatattcattcaaataagccactgccgtatccaatctttcctctaaaactaacgacggggtagccggatccccattaattttcgcacctaaaataagtaccgtatttacgttttcatcaggtttggccctcgtcccgctaaacataaatgccgctacaatcaagacatatataaatccaattacaattaaaataacgaaaaatttcttaaagcgtagcatcttatttctcctctccttacttctttatttagtttagcaaatgattcttaataaaagagaaagaaataatcaagttaatggaaaataaaaaaaggtcctatgttcttaaatggcttaataacaccattaaagaacataggactttctttacgcgtttcaaaatatggagatggtgggagtcgaacccacgtccagaaatatcggcacttgaatatctacgagcgtagtcaccgtattagcatttcgcataaacatcagcccggtaacaggcttccattcagctagtctgattaagctcttctatttaacctcagacggagattaactagtgtagcccacttagagtgagacccttaccgtagcacatgggcgatgcacggaggatcagctatgctactgcttattaggcagcgaaagctaggttttgtttttctttgccagttattattggctttgacgttgataacgaggacgatccccccgactcgcaactcaagctcgaactatccctgtcgaatccgtaacatccccagagttaaagtctaacattagatattatacaggaaaaaacgagcctttacaaacagaaaaaacttgtgacacagccaaatgtacaactattatttagcatgccacaagttttcaattaattgatagttaatttcagtgagtatttcataacttcgccttcttcaatatagggctctattccattaaaatcaataccaatcgtgtactcgcctttatcaagattacttgtaggaacaataatttgcgccttgtcctcatcataatttactttaaatgaatcaaacactttatcatcatctgaatttcgaatccatacctcttgaacaccattaatatcctttaaatcatacagttgtgtataaattggtagtgtgatatatgcatcttccccataagcaaccgtttgatctggtaaagttccaatttggcctagtacagttattttatcaacaatagtaggtggtagtatgtttaaataattatagctcaaatccatacttaccaaactatccaaatgagtgaaatctgtcatttctgttgtgaattgattcgactcaaagtttacttcctgtaaatttttcaagtttgtaaaatcaggtacatcttctgaagcaaggccacattcatttagcaacaacgtttctagtttaggaatattagaaaagtcaggcaagctccccacaatagttctactaccaaaattaagatactttaattctggataattttgataatctggtacggtaatattttcaggtggtatttcacttgttatacttacttctgctcttaaagtatctaatagaggtaaagtcggtaaatccggaaatttagtgaactttgtttgggtaggataaatcataatattatttacattggtaaaataagcatttcctagcatttctaaagtttcgtctgttaagtaatttgtaaaatagcccaatcctaatgatgtcgctgcatttatatcatcttgcgtaatgacgtctgtaacatcacttttgtgcaagttttctaccatatctttcgctaagttttcatctggaaaaacatcaattattctggctggcaatggatatacctctgtcacactagcatttgcatccattgcattcaagctgacaactccaataataatcaaactaaatactataaatagtcttttcatcttttctcctccttaaagaaaagagcgggatatatcatcccgctctatctaattatttggcagatggcataactctaacattatcaatatgaatacttgttccgcctttagaatccatcacaaaacttgtattaatatttcctgttgttactttgacatccttaattgaaacataatgccaaacattatcagctactaaatcaatagtctgaccttcactgctatcgtagttattaactgtcatttgtgcttttgcagtatcatctttacttactttaacccacgcttccacatcgtaattcgcattattagtcggaactgcgatttgttgcgctagtgtttgctggtaagctcctggtaggtagaaataagcgctctgacttccaaaagctggtgattctggaggattgacacctgaaccactatcaacgccatatgccttatcctgaccgtccggatgagactctacccaattagtagttgcagcagggtcacgttcaaaaccgccgttatcaagtagatttacttctgattgaacgggactgttaatcggatctgctgagataaggattctatcaatattgatatttcctgtagtttcaccgtccattaagaaagtgattttatttgtaccagcttttaaattcacagctttttctgtatcagtccaaatattccagttttcaccttctgaagggaaagttacgcgagaattataagtaccatttgtgtacaaatcaagcgtttgcggcatcccacttccatttgcagttcgggtatttagcacatattccccgtccgctggcacatccacttcaaacttgatttcatctcctgctgctccaaagccgccaacaaagccttctccactatagaaccaatgatcatttgccacttttaaagttccagatagagctgcttcttccgcttctacttttgctacagttggagtgaaaccaatatttactttgtctaatgcgacttgatctgctttgtcgcctgtgtctgtaaccactttataagagatactatttttccctgctgcaagtggtaagttttccgcttgaacagtccagtccgctactggttttaaagttgtttgttttacatattctccatttacaaaaatacttaatgattggttatcttcggaagcatttttgtatgttaaatcgacattataatcgccagcatcttttacatttgcataaattgttgttccagagccatctgaatcatatccatctacataggtttgttcagttacaggtttctcggcaactgtatttgcaaaactagaacctttttccatttcatatgttccagtttgttccacgcttttagaaccggttgctgtaataactgtatctgcgtctccttgagctggtactttcacataagttactgcgccataaatatcgctagaaacagcataaccacttccatctgcattttcgagtgcagataaatcatcgtataatttgctatcagtgccattaacttggacactttcagcagcatttccgtgtagttttacaatgtaattttctgtgtcagctttgtaacttccttctttcgcgccaactgtgaaagtagtagtatctgctgttttcgatgttgtcattatttgtttcaaataaacttctttttcataatcaaaagattttccatcgtcatcataatgtgtaaatgaagtatctttttcagaagcaaatgtgtctaaataaacggttttaactgcggattcaccaacatagttttgcggctgttgcattggtataattgcgccttgtttaacgaacatcggaacatccgtccagtcatcgtcatttacttcataattgatagtttggttcccttcgtagacatcaccacgattatagtctacccaagttcccgctggtaaatagatttcacgcgaaccagcaccctcttctaaaataggagctgcaaggatagcatcaccaaacatccattcatttgttaggttaactacattttcatctgttggattatcaaaagtaagtggttgaacaagtcctactccagattcataagcttgtctttcataggcatacatgtatggaatcattgagtagcgccaagtcatactacttttcgccacttcttctgcagtcccgccgtaataccaaggttgacgttgttgattatcattaccatgtgttctaaatactggtacaagagagctaaactccatccaacgactataaagttctggatctggatttaatacttgtccagaattggcattaaaaccacctgtgtccatgccccatttcgtttgtcctaaattgatagtagacaacatcgtacttggttgttcttgcattccatttgcccagtcaattacttcgccttttttccactgtacgccgatatcgcctgaccaaatggatgttgaatagcgctgagctcctggataatatgttcttccagtctgccaaacacgttcattcgtgtaatcacgttgaccttcatacattgcttgagatgtaaaacctgttgtgaaattcccaaaccaataatccgctccattggaggatactttgtcagtttcatcattccaccaaccgacgatacctttatccagcgcatcttcagaatgagaccaccaccaattacgttcatccggattatacggatcgatacttctaacagtaactgggaacgcgtaatcttcatacgcttcttggcctggataccagtaaccatttgcctcagcatctttaccttgttgcgtttccgttccatcttgtagattagttaccacacgaggtttagtaataccaatcatttttacacctagtgcatccatatcattttttaaagtagtgtcttttgcggatgggaaattagttgtattccaagcaaattcaccgtaatcccctccataaacaggatctccgtaaaacttccaatcgtagtcaaaagcaaaagaatcaatcggaattcccttagcacgatacgtatcaatatttttacggaattcatcttcatttgttccccattcgaaattggagaaaccaagagaccattttggcatcataggagtatgaccagttacatcagcgtaagaggacatgatttcttcaggttcccctgacatcaagtacatttctacattttctttttcataacgacgtccttcaacaacggtatccccgtaatagaattccagcttttcttcgtctgaaacagaataaggataacccccgtcactgtctactaaaaggccataacctgctgtagaccacatgaacgggccaccagcattaccttgttgacctgcttgagctgtctttccgctatttgcagctgtattatctcgctccatcccaaggtctccgtcactaaaactaataccataagccccataaacatggtcagctgcaccgcgtttaaatctcacaccaccatcgaaaatcccaccatcagccgactcagataataaagtttttccctctttatctttaaaagtcattcgcgctggttctttagaaatttcaagtgtgcattcgtccgttgaaataaccataggatcagattctaaatcaatcttagccccaattgctgtaaaagttgcattaggatcaatcatcggtgtcgactcactattttcgatatttcgcggtcgtaaattaactttaagcagattattggcaagtggtgaaatttctaagtagtcatcttctgcttcatccccgttatcaatttttagcatgataacattgtctgttacagttgcctctaaaacatttccaagcccttcttctgcacttagcttcgcatattcttctttactaagctgttttgcagtttctccattcgcttgttgtttcacttcttttttctctgtttcttctgcgttaacttccacttctaatggttgtgttatccctaaattcaaccaaacaagcggcacaacagccatactgacacaaacttgcttcatcccttttttcatcatctcgctccttttcattcagtaattgttacaggaaaatcataccaccctaaatattctgatccattgtaatttagtgagatttctaacaaatgttcaccaggctctaatcctgctgtttcaatagtgtacatgtaagaacccgtataggatggatacactggtttataaagaaattcaccgttatcattaattatcatctcgttcccaggagctggtgcgataaaatctagcgcttgataaataaacggcacaaaaacatctaaattttcgccttgtttaattgtccttggaggataggttgccgtctgtccatcaaacgaacgattcctaatttgcccagttagaaaaatatcttctggaattgatattaaatgattatcacgaagaagtaatgtttctaaattaggcatattcatccaaatatctttcgctatatatccagaaagttctgcttgctccatgttaatactgactaatttttccatcccaatgaactcaggaatattaattccgaaattatttttactaaagtctactgtcgttaaattaggataatttgcgtttggaaattgagtaatgtttgcatcagatgcttttatagtttctaaagcaggaagactctccgataagtcaggcatctcgccaatattattactccaaatagctaattctgttgcgtttgtaaaaacttcattattcaatacattcaaatcttccccagttaaatttaaccctggaaatggtaggattgtgattgtatctaaatcttcttgcgtgataatatcatttacagaatctttatccaattcttcagcaatcgcctcagcaattgcttcaactggaaatgcctcaatgattggagctggcaaaggaactgtatccgcttgcacttttattgttggtgaaagtaaaatacaacaacttacaatgaacaacaatccaattatctttttcatctcttactcctttcaaagcaccaccctcttcacctcgaaaagggtggcaatgtgtttattatttaattacaacatgatcaaagttaattcccgctgtatcgcctgcttcaaaatcaaagacaacttggttaataccatcttgcaaggttactggcacttccactacgtcccaagtatcccagtcagccgttttcggtaaagcaatttgttgtttgttgccatttacataaaccgttcttgtagcatcttccacacccgcgctataacgcacttccatcgtataatcggatgcgccatcaactgcatcaatatcaaactcaactgcttctttttcttcatcaaatccagctacaaaaccagttccagtgtagccagcatggtcacttgcagttgatacgtttgttaaatgcccgaattccgcttcataaggcgcatgatttacaccatttaaaacgatagcttgagtagtatctgttgccgcagttttgatgtaagttaagttttgtacagtgtcatagtaataagcgcttgttgcttcattaaaggcatctagtgtgtctgctttagctacctcagctcctgcaactgttacacttgttggctctgtactgaaaacttgcatcgttgtttcatctgccattgccggaagattgaccgtaactttttcatttgcaaagtcttcagaaacgctaatatcacgcatctcgccaccatttacatcatcatagaaactgtactcgctgtttcctgatgggtaaactcggaacgttaaattatcatatgcttttaaatcgtttcctacattttgacctagttggtaaccatctgtcatattcattggaataatcgctccagcttttgcaaatacaggtagcgtatcaacatctgcatagtaagaaattgtttcgccacctggatggataccgccgttccaaatatctatccattcgccttctggtaaataaacttctttttctgtttggccttcttgtacaattggtgctacaagtaaatcatcgccaaacatatattgttcatctaaattacgcgtattaatatcttctggataatccatagccatttgacgcatcatagatttcccattatcagcagtatcttttgccgctgtataaatataaggaagtaaattcatacgtgtatataaatatttttggaatgttggtaaaatcgtttcgtcgccagttctagctactgcattccacggtgagcgttcttcacttggcgatggatctgatttttccgagtggaactgcataatcggtgcaaaagccgccattgctgttgcgcgtttataaagttctgctgttggataatttcctgtgaatcctgccatatcccatgcccagtaagaaacgcctgatgttgaagcactaagacctgcttttacggatgcttggaaagaatcaaatgtagaagtttgatctccagaccagtaaatgcccgatttttgtgcccctgaagttccagaacggctaaaggaaactgcctctggatttatactttttgcaaaatcgaaatagctggaaacataatctgttggataacggtttctcatttcttgccctttttccccgttagaaaaagttgtatcacggccccaaaccatttctccaccatctgtcttgaatccatcaattccgacatctgttagtaaatattcacgttgagatgtccaccaatttaccgcatctttatttgtgaaatctagtaaaatcccgttaccaaaccactgagatgctggaactcggtaaggcgcccctgttccatcgtccgcactgtacccttgacttatcatgtagtcttcatcattatctctttgttcatacactgtattatcatcttttaatacaggaacttgccataatacaatgttcattcctgcatcatgtacgctgtctaccattgcttttggatttgtccatttcccgttaaatgtaaaatcatcataggcaaaaggttcaccatttttcttcgcagtatatgtcgcgtcgttccaaatgtagtaagtttcttcatcactccattgttctaatacaaatcccgttgctggaatttcattttcttttgcattagaaagtgctgtacttacatcagattctctatcccattcatttgctgacatccaaagtccgaatgcccattttggtaataatgtagtttttccagtaatatctgtgtagttatttacaatatcattttgatcttttccgctgatgacataataatcaagcatattcgtcatatcgccatcattatctaaaataaagctatatttgtcttctacttttgaagccatttggaattgtgaatgaaaatcagaattcacaaacataccatatttatttgcacttacaaaaaacggtactgctaaataagttcgttcagtttgtgcttggtcttggtactcattataaacataggtttcaacatctttgcctcgttgattaatagtatcgtaacgttcaccaaaaccatagaacgcctcatcacttggcgtcataaaattattttgatactgattgataacatttttgccatctgtcaaccaacctaagctgttggcagttgtatattcacttgtaagtagagttccatctgcttggtacacttccatgcggtaaggagacttttggatttctactcgcaaatcgtcagttgtaactgttactttatctgcaccatcatctactgtgtaaccagtttttccagcatgtccagtttctttaccggttggtgatagttccatacgaagtgtatctaaatcctcaaacgaaagatataattttggagtgaattcacctgcagtagctgtcatatttaatgtaatagaatctccattatctacaacgctgctgacatcttgcacatactcccagtccgtcacgtaaaatgtaaacggaccactttcatattcagttcctccgtcagtagaaccttttgttgtataagtaatttcatcgcctttttcaaattttcctaaatctgctttccagtaagtattgttcccgctattataatcataagctgctgtaacattttcttgtgctaccccgtttttagtccattctacccaaacattttgtccatcttcaattggccaggtagtaatatttaatgtcacgtcttcaccagcttttggatctctaggagaacgttctgttggttggacagtatatagatcatcatccccatatggcgagtgatattccccatccatcgcgaaaacgtttgtcccaaatccacttaaacaactaaatattagtatggtcaaaatgaaaattaaactagattttcttccctttcgcttcatctctctttcctcccttaatgtatatttttactaaaaacatattacttttgatgtattatttcgcaaaattattaatttttgcatatctatgattgtagaaataatcacataatgttataattctttcacagatacactaaaaaagttcaaattactaataatcctacaaaaaaacgcaactatgccagaccattcttcatggaaaaacaataattgcgttcatcagaagaccttgcttaaaaaactttaaaacaaccagttaatacttttgaacaaagttaacatgtcttctccctcctttttcatctatacagaaatactaactcacaaatcttacataaaattaaaaagcatcaaatttgaacaaatggagctgagttttatgcaaaatattggtgatacattaaaatttattcggaaaagtaaaaacttaacacaacaagaggcctgtacaaatgctctcagtcgctctaattatcaaaaaatcgagaataataaaatcatgcctagtatggaccgttttattcaaatcttacttaatttcaatatgacgttagaagaatttgaatttataaaacgagactttacaccttctccaaaagaaaatatcctttatctatactccaagattattacctcctcagaaacagatatgatacttaatgttatttccaaatgcgacgactacttagaaacccacaacgatatttttatctctgacattaaagcctcacttgaaggcattttactagctgaaaaagaacataattttaaacttgctcgaaagaaagtaacctacatttgggacaggctttcggaagctgatgaattattttggaatgacatattaatattaagaaatattttctttatttttgaaaatgaaaccgctcaacatattgtaaatcgtcttatttctcaacttaaaaaatatcgttacttatatccaaccctttcgattgagatttcgcttcatgttaatcgtgctacttatttaattttggacgaaaaatatgaactagctttgcactacattgaattatctattaaaatcgctaagcataaccattattacttacaattttgcatggctgttgcgaaaaaaggaattgttctgtataagctaggtgaaaaacaaaaaggtaaacactttatgcaacgagcgctcagagtggctaaagtgcttgaagaagaacgtattttaagcgggattaaaaatgaaatcgattattttcttcatgatgagatgcataacctctctttgaatgaatttacaaaaatagacatataaaaaaagcctaaatctagcttcttcaactgttgttgaatgactagattcaggcttttattgttggcgctctttaaaggcgcgttcaatatcacgttttgcttctttttgttttaagtcttggcgtttatcgtatttctttttacctcgagctacaccgatgagtacttttgcgtagccatctttaatatacatttttagtggaacaatcgaataaccggactctttcgtttctccaattaaacggctgatttgcttcttatgtaagagcaacttgcgcgttcttagtggatcatgattgtagcggttcccttgttcatatggactaatgtgcatattgtgtaagaaaatttcccctttgtcgatacgtgcataggaatcttttaagtttacccgtgcgtttctgacggatttgatttcagtaccttgcaggacaatgccagcctcaaaagtttcttcaattgcgtaatcgtggcgcgcttttttattttgcgcgactagtttaccatcaccttttggcataactccccatcctttctagcgacgttttttcttcttcgggctttcttttgctacaccttgataaaaaggttttttcttctttttctttttaggttttgtataccattcgtcttctttacgttctgattttggtttcacgtcttctgatttaccagttctacgtttgttacgaccttttttttggttactcttaaagtttctagttttatcaatcggtttttcacgttgacgtttttgtttatcgctcactggacctggtttgccttcactacgaagagcaaaatcgatttcacgagcatctacgtcgactttagttacttctacttccacttcatcaccaatacgataaatttggcctgttctttcgccaatcatcgctaattgattttggtggaatttgaagtaatcgcctttcattgcgctcacatggactaaaccttcaatcgtggtcggaagttcgataaataaaccaaaattggttacagagctaataattccgatgaatcgttcgcccactttatcgaccatgaactcagttttcttcagttcgtcagtttcacgttcagcttctactgcacgtcgctccatttttgagctatgttcagcaatctcaggaagctcctcagcgcgtttttctaaagtttctggacgaacatccccgtttattaaatattctctaataagcctatgaacgattaaatccggataacgacgaattggcgacgtgaaatgtgtataaaaatcagtagacaagccaaagtgtcccgcgctcactgtatcatacttcgcttgttgcatcgaacgtagcattacagtcgaaacaaccatctcttccggtttaccttttacttcttctagtacttgttgtaaggcagctgggtgaatatcattggcagttcctttgacaattaagccaaaattagtaataaattcaaagaaacgtgctaatttgtcttcttttggatcttcatgaatacgataaataaatggtacatccatccagtgaaaatgttctgcaactgtttcattcgcagcaagcataaattcttcaatcaaatgctctcccgctgaacgttcgcgcataacgacttcttctggatgaccttcttcatcaacgactacacgtgcttctttgaaatcaaaatcaatcgcgccacgtttttcacgtttacggcgaaggatttcagccaaatgttgcatcgcttcaagcattggaacgattggcgcatatttttcacgcaatgcttcgtctttttcaactaaaatatcattaacgtctgtataagtcattcgttccgttgttttaataatactttcaaaaatttcatgattaaccacgtggccctcttggtcaatttccatttcacaactcattgtaaaacggtctacttgtggattaagtgagcaaatgccattcgaaagtttatgtggcaacattggaattactcggtcgaccaaataaacacttgtaccgcggtcttgcgcctctttatcaagtggcgagccttctgttacataatgcgttacgtctgcaatatgcacgcctagcttccagttgccatttggtaattgtttgacagtaactgcatcatccaagtctttggcgtctgccccgtcaattgtaattatcatttggtcacgaagatctcgacgattgccaatatcagaatcatcgaccacatcaggtgctttacttacttgttccataacttcttccggaaaagcaatcgaaattccatgtttatgaataatcgataaaatatctactcctggatcattacggtggccgataattgacttaacaacacctcgagctctggcatgtccagttgcatattccgtcaattcaacgataactttatgaccgtctaccggttttaagccatcctctaaatcaatttccacttcaccgaaaagtcgtttatcatctggcatcacaattggagtaccagctaagtcttccatataagttccgacgatttgcgttgtcttccgttcgacaattttcttaatcgtaccttctgccaaattatcgcctttacgtttcgtgattgttgcaaaaactaaatcaccgttcattgcatctttaacttcatttggcgggataaaaatatcgtccatttctttctcttctgggagaacaaagccaaaacctcgttcatgtgcgcgaaatgttccttttactaagtccattttttctggtaatgcataccgattcttccttgagcggacaatagttccggaatcttccagttttactaaagctttcaccattaatttaaaatcatccgcattgtttaaagctatttctatttctaaatcttctagcgcaaatgttttatcaggcgctgaagttaatagattcataattttttcttccatttgtttttgttccacttctgtccctcctctctctgttttaaaaaatgtttattcttgccaatctaagctatctaaaaatgttaaaattgcttggtttacgtcttttctttctttgtctaatgtgatgacatgaccagattctttaaaccagtgtaactctttctttgttgattctactgtatcataaatcagctgtgccccgctcacatcaaccatatcgtctttttcaccttgaacgaccatgattggtgcataaatcatatctatttcagacacaacgccattaatttcatcttttagtttagcgatagtattcattggcgcgtctttataggcgaccatttctgcatcgatttgttcaggcgttttaccttctaattttttataattacgcacataatctaaaaagccttgaattattggtgatgagctgtccattcttgttggagtactcatggctataattccctttaacggcctagaaaaacctaattttagtgaaaaaagtccaccgagcgaaagtcccgctacagcgatttccgtgtaaccgagtgattttaggtgatcatatgccgcaagaacatcttcccaccagtcgtttggtcccgtttttaacaataggtcaggagatacaccatggcctctgtattgaggcgcatagcaagtgtaattgttttcttgtaaaaacctacctaatattcttacatccgctgagctacctgtgaaaccgtgtaagagtaacactgctcttttgcctttttcgaataaaaatggttgtggtggtgttattttcatagtaaatatcgctccttggttctttttggaggtttggttgatctggggtgggtgttgtttttgttggagttttagggggatttgttgtacttaaaaatttgtgctcccctttttgtgttgttcgtccacttttgttatggaaacaacgctccacttcgttacgccttgtattgtagttctagggaagcggactacgcttctggagaactacaataataaaaaaccacctaaattttcattcaggtggttaacatctcgttactgtacaaaatatgccagtgcaattagtattgcgaagaaaacaatggatagaacgatggttgtacgatgtagaataagttctagtcctcttgctttttgcttaccgaataattgctcagctccaccagagatggcaccggatagcccagcacttttacctggttgaagtatgataactgtaattaacagtactgatacgatgatgagtaagaccgttaaaactgtactcattgttctttcctcctaaaaccgcccaatttgactaaggttaattttaccatatttggtattgtacgtaaaggtttgtttctatacaatagttaaacaactttttcctcaagccaaactagatcgtctaagaagtaaatcaagtcttcttctaaaatatctttttcacagtcgttcacaatatcgtgacctgaacctgcgtagaagcatagttgtttatcatttgtatgaatgtgtttgaagatataattggcgttatctgcgtcgatttcttcgtcttggcagccttgaccaatcatcgttggcacatgaatcttttcaatatcacgcgcaacatttttgtagaaagtagcacgtgcttccgtcattacgtctatttcaggaaggtagttttttaacatatcatctgcttcttgttctactataccttgtttctttaattgtttagttaaatagttttcgattgggatatagcgcattttacggtttacattggcgcataaaggaacaatcgcttttggtgaaaacgattctgccattttaagcgcaaaaacaccgcccattgccacaccgacaattgcaatttcattatatccgtctttttcaagttgacgatatccagccaccgcatcttcataccacatttccggtgttgttttcaagaaaatagcgggttcatccccgtgacctctgaagtttggtgcatgtactgtgtatccattttctgctagagtttctccaagttctcttacgtcttctgtagtccctgcaaagccatgcaagagcaaaacagcacgatttcccgcttttaacgtaaagctacgatccgcactcatttttacgcaatcctcctaatatcatcacttttataatccactctattgtagcccatctgaactaaataagctaccttttgagttctgaccaatagaccaatattaacgctatccaaggaacttgtcaaatacttttttcacacccctcaaacacgttggtattaaagggttttaaggtgtttctatttgtgaatttccgcgcttaaattggaaaagaaagtatgaattaatcgtaacaattgttttggtttttgcctaggtaaataatgaagcccatttctaacaataaccatttcgccgtgttgaacagaatgtaccattttcttcgtatctttagaagaaatcaaatcgtattcaccaacaactgccaaaagtggtgcgcttattttctttaaatccgcttctgacatatgtggatgatagatggttaaagcaagttgctgtttcatacgttcaaaaaaacggctaaacggagctaagagaactgtagctccataagcaacgcggcaaaacaaatctggtaaaaagcggatttggtttacatgataatttgtgccaataacgacagaggcgatttgacgttttggttgcattttacccatgacaagagcaacaataccaccgtcgctataaccaacgactttatatttatcaattttcaaaaaatcgagtaatgaaagcatatcgagagccattatttcaaaatcaagcggcatatttcctgcgtcacttctaccgtgtgcgcgactatctacagcgattacttgatgatcaagtgctaagtcatcaataattcgttttaaggaacggtgactttgaccattcccgtggataagaagaatcggttcgccagtcccgtatatttgataaaacaagttaattccattgatttttgttatcataaagcatttctccttgctcgagacttctaatactcttattttacacctgattatacttgatttcatataaaaatgcttctaatatattaaaatacgcctgattctaatcaagctagaatcaggcgcactatttatttcataagtctacgatggtattgttgttgcggtacgtctgcatcaataattttctttggtacagagcgcttttccgctaaggggtggcttttttcatgcaccacagcgtctttgattttcggagtttcgagcacttttgaggcctgactattttttactttcatcagcattacctcctcttccaaatcattacccctctcgctatttttaaaacagaaaaaactccacgaaaatgttacttttcgcggagcttagcgttttattcaatcaacttatttttttaagttgtagaaagtgtcgttaccatgatattcagcaagatcagccaaattgtcttcgatgcggagtaattggttatattttgcaacacggtcagtacgagtaggcgcaccagttttgatttgaccagcgtttgtagctactgcaatgtcagcgattgtggaatcttctgtttcaccagaacggtgagagataactgcagtgtagccagcgcgtttagccatttcaattgcatccaatgtttcagtcaaagtaccgatttggttaactttgattaggatggagttagcgatacctttttcgataccttctttaagtttagttgtgttagttacaaatagatcgtcacctactaattgaacgcggtcaccaatacgttctgtaagtagtttgaatccgtcccagtcattttcgtctaggccatcttcaatagagatgattgggtatttagtaatcatttcttcataccaagttaccatttcttcagaagtacgagttacgccttcacctttaagttcatatttaccagtttcgcggttatagaactcacttgatgcagcatccatcgcaagtttaacttcttcgccaggtttgtaaccagcatctttaattgcttgcatgattgtttcaagagcttcttcgttggatttaaggtttggagcgaatccaccttcatcaccaacaccagtgtttaagcctttacctttaagaacagctttaagtgcatgtaggatttcagcacccatacgtagagcttctttaaagtttggagctccaacaggcattaccataaattcttgaacgtcgacattattatcagcatgttctccgccgttaaggatgttcatcattggaactggaagaactttaccgttcactccgccaagatattcatataaatgtacgcctagttcgtcagcagcagcacgagcagcagctaaagaaacaccaagaatagcgttagcacctaatttacctttgttaggtgtaccatcaagttcgatcattgctttgtcaattccgatttggtcagttacgtcaaaaccgataattttgtcagcaataatgtcgtttacgttttcaacagcttttaaaacaccttttccaaggtaacgagctttgtcgccgtcgcgtaattctacagcttcgtattcaccagttgaagcaccacttggaactaatgcgcgaccaaacgcgccagcttcagtataaacttcaacctcaacagttgggttaccgcgggaatctaagacttcgcgagcataaacttcagtaataatagacatttataattctctcctttgttgggattaattgaacgaaatgaacaagatattcacttcaaatcaaagacccatccgtttttaaattcgtttttattgtagctctgtttgcaaaaaaactaaagtaataactaaaattatttttgaattaaactttcgcctgtcatttcggcaggttttttaacgccaagtaaatcaagcatagttggcgcaacgtcagccagacgaccaccttcacgaagcgttacaccttttttcgttacaattactggaactggaacggtagtgtgcgcagtgtgcggttttccttctggagtagacattgtttcagagttaccatggtcagcaaagataatagctgagccacctttttctaaaataagatctactacacgaccaagattttcatctactgcttcgattgccttaatagttggctcaagcatacctgaatgtccaaccatatctggattagcgaagtttaagatgatcgcatcgtgtttgtcgtttttaatgtcttcaacaagcgcatctgttacttcatatgcactcatttcaggttttaaatcgtatgtttctacttttggcgaattgattagaatccggttttcaccagggaattcttcatttcgtccgccattcataaagaatgttacgtgtggatatttttctgtttcagcgatacgcagttgcgacaaaccttcattagaaagtacttcgccgataacatttttcatttcaattggctcaaaagcaacttcagcatcaatgcttgggttgtaaagagtcattgtaacgaatttgatgtttttagggtggttagccccacggtcgaaatgatcccattctttatcagtgaatgcattagaaagttgaatcgcacggtcaggacggaaattgaagaaaatcactgcatcgttgtctttaactgttgcaacaggtttgccatctttagtaatgatagcaggaacaacgaattcatcatttttgtcattagcgtaagaagctttgacaagttcgattggatcttcaaatttttcaccttcagcgcttacgattgctttgtatgctttttcaacacgttcccagcgtttatcacgatccatcgcgtagaaacgtccagaaacagtagcaattgcaccatagtttaagtcactaatagctttttctagtgtttctaaatattctagtgaggattgtggtgccacgtcacgtccatcaaggaatgcatggatataaacgtttttcacgcctttatctttcgcagtttctaaaagtgcaacgaggtgattaatgtgactatgcacgccgccgtctgatagtaaaccgaaaagatgtaggtccgaattgttttcttttgtatgagtgaaagcattgtttagggctttgttctcttggaattcgccttcttcaattgctttatcaatacgagttaagctttggtagacaatacgtccagctccgatgtttgtatggccaacttcagagttacccatttggccttctggaagaccaacatcaaggccagcagctttaagttccccgtgaggaaaattagcccagtaacggtcgaaatttggtttgtttgcttgagctacagcattacctactgtttctgcacgtttaccaaaaccatcgaggataataattgctacaggtgatttactcattttattttactgcctccaataatgctaagaacgatgctggttctaagcttgctccacctacaagagcgccgtcaatgtcggactctgcaagataatcagcaatgttttcaggttttacgctaccgccgtattgaatacgaactgcgtctgctgctttttgagatacagcgtctgcaacttctgcacgaataactgcacaagtttcgtttgcatcagcacttgtggaagatttcccagtaccgattgcccaaattggttcataagcaataacagatttgattacttgttcttcagttaatccagcaagagctgcacggatttgaccacgtacccaagtatctgtttgaccagcttcacgttggtctaatgtttcaccacagcaaatgattggtgtcatgccgtgtttgaagattgcgtgtgcttttttgttaatatcttcatctgtttcgtggaagtactcacgacgttcagagtgtccgataataacataagaaacacctaagtcagcaagtgcaaacgggctaatttcgccagtgaaagcaccttcgtcttcaaaataacagttttgtgcagcaacgcgaagattagttccttcagtaagacgaactaattcttgtaaaaatagagccggtgcagcaactactgattcaacagcatcgcttgatggcacattattttttacgtcttctgcaaattgtcctgcttttgcagcagttttattcattttccagttaccagcaataattggtttacgcatttggataaacatcctctcgatattaaaaattatttttggttcagcttatttgtcgctaatagaagcaacaccaggaagctctttaccttcaagatactctaaagatgcgccgccaccagtggaaatatgtgtgaatttgtcagcaaaacctaagtccatagctgctgctgcagaatccccaccaccgatgattgttgttgcatcagttaagtttgcaatagcttcacaaacgccaattgtacctttagcgaagttgctaagttcgaatacgcccattggaccattccatacaactgttttagcgccttgaagttcttttgtgaataagtcaattgtagcttgaccaatatctagtcccatttcatcagctggaatgctatctgcactcactgtatggaaaggagcatcgttactgaattctttagatacaactgcatcaactggtaatactaatttatcgccagctttttcaagtaagcctttagcaagttcaactttatctgcttctaaaagagatttaccaatttcttgaccttgagctgccatgaaagtgaaagtcattccgccaccgacaagtactttgtctgcttttgtaagtaagttttcgataacaccgattttgtcagaaacttttgcgccacctaggattgctactagtgggcgtgctggattatcaactacaccgccgatgaatttaatttctttttccatcaaaaatccggccgctgattctaagttagaagcgattccaacgttagacgcgtgcgcacggtgagcagtaccgaaagcgtcatttacgaaaacgtcgccaaggctagcccagtattttccaagttctggatcatttttgctttcttttttaccatcaatatcttcaaaacgtgtattttcaaaaagaagtacttcgccgtcttttaactcatcaactgctttttcaagttctggaccacgagtagtaggaacgaatttcacttcttttccaagtaattcgcttaaacgagcggctactggacgaagagatttcccttctttatcttcttctgtttttacttttccaaggtgagaaaatagaattgctttaccgttttgttctaagatgtactcaattgttggaagtgcagctacaatacggttgtcgttagtgattttgccgtctttcattggcacgttaaagtcaacacgaactaaaacttttttgttttttaaatctaaatcagttacaacttttttagccatttagagttcctccattaattttaaaggattggggtcgcccccgttatttcagaaaataagcggaaacaatagtgtctccgcttattcttgttattgctgatgtgactagcacttcagtaaaattaatctgctaattatttagcgatttttgcaaagtattctaaagtacgaactaattgagcagtgtagctcatttcgttatcgtaccaagctacagttttaactaattgttgatcgccaactgtaagaacttttgtttgagtttcgtcaaataatgaaccgaaagtcatacctttgatgtcagaagaaacaacttggtcactagtgtaaccgaatgtttctggatcagaagctgcttccatagctgcatttacttcatcaacagtaacttttttgtcaagaactgttactaactcagtaagggaaccagttggaactggaacacgttgagcagctccgtctaatttacctttaagtgttggtaatacttcaccgatagctttagcagcaccagttgtattagggataatattttcggcagcagcacgtgcacgacggaagtcaccttttggatgtggagcatctaatgtattttggtcaccagtgtaagcgtgaattgtagtcattagaccttcaacaacaccaaatttgtcttctaaaactttagccattggagctaaacagttagtagtacagcttgcgccagagataactgtttcagttccgtctaatgtttcatggtttacattgtaaacgattgttttcatgtcgccagttgctggagcggagataacaacttttttagcgccagctttaatgtgtaattcagctttgtcttgtgctgtgaagaaaccagtacattctagaacgatgtctactcctaggtcaccccatggaagttcttctgggttacggttagctaatactttaacttctttaccgtttacgttgaagaaaccatcatgtacttctacttcaccgtcgaaacggccttgagttgtatcatattttaacaggtgagctaacattttagcgtctgttaagtcgttgattgcaacaacttcaattccttccacattttgaatacgacggaatgctagacgtccgatacgtccaaaaccattaataccaactttaactgtcataagtcaatttcctccttgaaaatagtgtttttttatttcaaaagggtattactcccttttaaaagcgattttgctgctccttcatccgtgattaaaatcgtattttttggagcacttttcatatacgacttgattgctttggcttttgatgtaccgcctgcaacagcgataatgtgcgggatttgcgctaagtcttcgaactgaagaccgaatgtaggaaccttatgtacaacctcgccttgttcatcaaaataataaccaaatgcttcaccaacagctttacgacggatgattttttcaagtacatcttcgccggtatgtctgcgtttcgccatcgcgagcgcatcacctatgcctaaaataatagcatttgcggattgtactaatcgtaagccttcttgaattgccggctctttcagtaaagaacgataggcttcttcgccaagttgttctggtacatagagaacacggtgttttgtgtttgtctttgttgccatcttatcacaaattgtattcgcttgattgtcaaggtcttcaccaatacctccacgaccgggaacgaaaagtagttctctgccttttgcgaaatcagttgtcatcatttcggcaacagttgccattgtagagccgcccataactgcgacgatgtttcttttttcggtgagtgccatgtctaattgttctaccgccacacgtcccatttcttcgcggacccatggtgtatcatcgctatcaccttgcactaccaagcattttttgatttgcaattttttcgctaattgttcttccattgaatgtaaccctgaaagctggttcatgacattttctaaatcacgaaaaactaccaagccttcttttgtaacggtcattccggaagaagcaatttctactaaaccttgtgctttcaaaaattctacttcgccgcgcaggactcgttcactcatgcctaacattccggcgagtgttcgtcttcctactggttcagaaaaatatatcgagcgtaggatttgatagcgtttttgcataatcattaaaacgtcgggcaataactttttctgaatgttaattaagtctgacatttttaattgctcctcatctttggacgctttacgacccacttagtcatctggcgtcccgttagaactaaaaaaagtagagatagaggtttttacaactttcaagactattaaactagctacttcagcttgttaacaaagtgtctctcaatgtgatttttaccccttctctttctgcttacgctggtgaatctttttttaatgttctttaactaccctacgttccctattctaacagtcttggcacaaatcttcaagtgttaagtgggacatttatgaaatattcacctgaaatttacaattaagttttaaaatgtaaacttctaactaggctatactagttgttttccacgtctattaaaaatgaaacatgctcttgctgatttttttattttaaaaagacattttttgtcccacagcctagttgtgaggcaaaaaatgtcttttaaaatctttttcttttggaagatgatggaatatttaactccaagcgatatttagcgatagctcttcttgaaacttgaatttctttttctgcgagcatatcaactattttttgatctgaaagtggttttagtttgtcttctgctgctacgaattcttgtactagttttttaatcgtggtactggagatgtcgccaacattttcgttttccgaagattttttctgtaaaccagatgcaaaaaagcgttttagttcgtacacgccggtatttgtttccatatatttaccatttaccgcacgacttacagtagactcatgcaccccaagttcttctgccacttcttttaaagttaggggttgtaaatgggctgaattgtcgagaaaataggctttttggtgacttacgattgcctcaccaactctttgtaatgtattttcccgttgttcaattcctttttttatccaatcaaattcacccgctttttcacggagaaattgggccacgtctttttcttctgttgctcgcattgtttcataataagcctcttggaacctgacttgtggtagaaattgttttgccaaagatactgtaaattcatttccatgttggagtaaaattaagtctggtactacatactggacacgttctgactcaaactcagagccaggtttaggatttaatgtttggatgtaatcggaaacttcttgaatatcttgcaagcttacatccatttctgaggcgattttcttccattttttctccgcgaattccgtgaagaatttttggatgacatcgtaagcaatatatggagcatcaggcgaacgttcgatttgtagtaaaatacattctctcgcatccctcgctcccacgccagcaggttccatcccttgtaaaatttcaagtccttctaaaacactggaatcgtccatcagaagtgctgcactgacgtcttttaaatctatttgtaaataaccattgtcatttaaactttctattaaatataaaacaataattttttgggtttgcgttacatccattaaatgcaactgttcttttagcgcatcggccaacgtcagcttattatcggctatttgttctaaccaatctgtatcatcagagcttccagagcttttacggctactataggaaaaatctgttgcaaaatccgagcctggaatcacttctattaatgggttctcgagtgctttatcttctaaaaatgccactaaatcagctgtcgcaaattgaagcatagcaatagactgtgacaattgttgcgtcatatttaatttcagcgattgtttttgttgttgcttttggacgaaattagattctaaacgcacattaaaacccccattaaaaatcagtctgatactactaccaaactggattatattccatttctagtcttcattataacatgccatttttcaaaatacagcacattatatttgaaaaaagtccaagcacgagttggagtgcttggactttttttattttggtaaatggtttaagaaattgcgagatgcaaatccttctacttcttctttcgtatagtgtttctctaatgtttggaggaagctttggtacttaccgacatgttccagtcctttgacatgatctgggataccatcaaaatccgagccaaaaccaatatttttcaatccaccaagttcacaaatatgatcaatatggcgaataacatcttccatatcagccacaccagagttcgtagtaaatagtgggtggaaaataacatcaatcattgcatcatgctctatcatcgctttaatttgatcatcatctaagtttcttggatgagagcagattgctttagcgcttgaatggctggcaataacaaactcagcttcatctaaagtttcccaaaaagctttcacactcaaatgcgaaacatctgtaaatacttttcttttatttaaaagctggatgatttctttgccaaaatgggtcaagcctgcaccgcgttcttccatgattccatccgctgccaggttagcattattccaagttaaaccgacagataatactccaccatcaagcaattgtgttagtttatctaggtcacgtccgattggttcaatgccttctaatgttaacattgcaccgattttatcttccggcagattttctaattcgcaccatttcttcacatgctgaatcattccgcctttatgaagaacgtgttgtttaaaaatattaacttgctcaactgctttcttccatttatgttcaacaggaacctcttcgtcaagaaaaatggcgaatccttgtaataacattttagcttctataagccgttcaaaattcacatcaagttcttctgcatcttggaaagtgtattttccttttccagcctgtaacttataaagcgcatcacagtgggtatcaattactctcattttctgtcgttcctccttttagatacatctattatatacctttcagaggaatagacaagaagtttatttaggacattattattttgtcattttatgttgtttacctggccaaaatgcccattttccaaggagtacggtaattgatggaacaaggaatggacgaacgataaatgtgtctagtaatacaccaatcgcagtaattaaaccgaattgtactaatagctggattggcagcgtggttaaaacacaaaacgttcccgctaaaattaaacctgcggaagtgatgaccccaccagtttgaccaacaccttctgtaatggcttttcgaagtggcattgtcttactgtttttccaaatactagaaatcataaagatattgtaatcttccccgagtgccacaataaagacaaaggcatatagtggaatcaagccagaaatagcttctactcccattgcataatggataatgacccaaccaagtccaagtgctccaacgaatgaaagtagaactgttgccactaagtaaagcattgctgtaatcgaacgtaaataacaaagtagtaaaatggcaattaaggtaatcacgagtgggataatcactttttcatcatgctgtgtcactgcccggtcatcatattgtgttgctgtttggccggctatataaacatcattgcctttatcagcagcggcgcgaacttttggtacgacatccattgcttcattgctgtaaggattgtctttcaaaataagtgtgtatttttggtaacccttgcttcgttcaggcccagtaaccgaagctactccatccacattttcaagcgaacttttcattgattctttggaattaacaaccacttccattggtgcgagcatacccgcaccaaaatgatcactaattagtgtgaaaccttctcgagatggcatgtcttctgggaatgtcgaaagtgtatcatacgtatatttgacttgagtcgtgaaaattccacagccaattagaatgattaaagtaataatcaaaatacgcacaggatgttttgcagacatttcaccaattttatgccaaaaacggttttctttgtggtgtttcggtgttttcccttttttctttgcacgggcttcttccatttctattgttcttgggataaatggccagaatgaaacacgaccaaataagccaagtagcgctggtacaagtgttaacgaagaaatcatcataatgaaaatcgccaaactaaaaggtacggcaaagttatggaacgaaccgtattcggcagctaaaagtagcagtagcgccgccataacagtcaagccactaagcgcaattgcccccgctgtcccactaaaagcttctttaaatgcttggaaacgatttttttctgtgtgtaaatggcttcggaatctagcaatcaagaataaacagtaatctgttccggcaccaaatagtaatacggtcattatcgagagtccttgtgaaccgtatgtgataatcccttcttttgcgagtaatccaagaatcggcgtaattactaaataagcaaaccctactgcaatcaaaggaattaatgccaaaattggcgaacgataaataactaataaaaagactagaacaagaagaaccgtaccaattaacagtgaaacatctgcgtctttaaataatccgctcgcatccacactgataccagctggcccagttgtccgagcaactagtgtgtcatcagctgacactttcttcgcaaaaggatcttcgccaatcgtttctttagcagttgtttcgagttgtttaaagctctcagctagttgatctgacgtcgcactatctttcataataacggtttgaataaaagtggtcccatctttagaaacttgttgttttaacgcaactggtggcattttatcatatggaactgccattttttggaagtcaactgggtttttagttaattctttgctgtatttttgaatattagttaaatctgctgttgttaagccagttgaacgataccaagtaacaagtgctggcgtcccgtctgtcccagcaaatttatcatcaattagtttttgagcaactactgaaggctctgaactaggtaaatctttcgctgcatcgtctttgtaatcagcagcttttggaaagaaaaactgtaaaattataatagcgataatccatatacctagtgttataaatcgacctttcttgccacctacaaaactggctattttacttaaaaatccatctttcattataaatccccctttagtttgcttattttttcgtttatcaaatgataagtgaaacgccaaaaaaagaagcacgctaaattatacctcttttttacaaataccaaacatcattaaattgattaattcatcgatttgttctgtagtcgtttgtttttgcgcgaaactacctttaccagaaaacagtgggctaatagttgacaagcagtatcgtgcggccgtttcagcactgacacctgcgcgcaactctcctgcattttctaagcgctcaaaaaattgttgaaacggcattaaatatgtttgttgccataacttatatagtaaaaactgattttccggcttcatttcattaagaatatcgtgaatcattagtaaaatattagtcggatgttcttcaattaacataatcaacatatcatgtaactgttcttctttcggcttattcaattgtaaaatcggatgcatttccacctgaatattctgcgtcagttcacgaactacttcaatataaagtgattctttatcttcaaaatgatgataaagtgctggttgggtaattttggcgattttagcaatttctcttgttgacactgcccggtaacctttttccatgaataaatcccgcgctgtgtcgagaatttttcttcttgttattcctagttcttctgcccgagttcgtttcttttccatcattaccccacctttctcatttgtttatagtaagtagttgtatatttttatcaattaatttttgtaaagtttctttgtgccatttccgtcctagaactcgtttacttacaagatattttccttcttctagttcgccgtcctctgttaccgcacggataaataaacggtacaccaatttctttttaactagcgcaatttgttgaatcgtttttgcatctaaaaagtgcatttctgcgtcacttaatttgaaaacaaatgtaaaaatcccagcttccgtaaaggctaaaataagcgagtggcgtcctcgcatatgaggtcctgcatataaaaaatcaattgtttgaacgttcaaatgattatcttcactatatgttcttacttctttttctaaccgttctttcaaactagcagccaaaataagcgcctcccttgctgatttatattttaccagaaaatgctgggttgaagtagactaattttagcagaaagttaaataaggtatttatctcttctactaaacatggtaatatcaatcttggcatttaaaaagttagtataaacgttattgcgattatataaatattaaaaaggaagttggtaagagaatggaagaacagcacatcattgaaacacgaaacgggagaacatcatttttcgatggaggtttactgcaatatattggttggacaatacttggcactttggtgacgatttgtaccattgggatttgctatccatgggctttatgcatggtttatggttggaaaattaatcatactgttatcgaaggcaaacgtttgaaattccaaggatcagcctttggactttttggacattggattaaatggttacttctaactattattactatcggaatttatggtttctgggtttttattaagttagaagattggaaagtaaaaaatacgatttttaaataaaaaataaaaacatcttacaaatgagctttcgccaattgtgagatgtttttttctatgccctcggagggattaacgagtattgatacatagccatttataatgcgattgccacaaatcatgccacaaatttttaaaacacttgcaattatataatacatgtattataatataaatatagaaaggagttgagaaagtgaaagatgttttagaggaaataaaaacagtccttgaaattatcactcttgtagtagcgctgacaacaatacacaagaatgataaagacaagaaccgctaaatcagaggggtgaaactcccctccctctattaaaagtatatcacgtctttcataaattatgaataaatatatctgggttatattaattgttatctgtgttaacggactcgctagttactttcagaatatagcattgaccatcattgctatactgactacattagcttgtttagtgtacttaataaaaattaggaagtgattaattatgacgaaaaaaacgacctctgacgcgcagttgaaagcaaataaggaatggcaaagcaagaacaaagaacatgcaaattatttaaaaagccgttcagctgcgcgatcttttataaagaataaagctacgttggaagatttgaaggaacttgaaaaattaattatagagggaaaaattaatcataagggaatgattaaggataaatgatgcacgctaagcacatgcttggcgtttttttgcataaaaaaagccctaacggtggggttaagggccatatatttctagttattcgaattaactaccactctgtcaattaacatttctttccacgtttcaggaaaaccaatcatttctagttcaataacctcttggtatttttgtattaattcttctattttatttacaaatatttcccactctgtttgatcaacgcacaaaaatttgaatataaatataacaataaatattctctttatatttagtttagccgtcccattaggtaattttggcgatactgttatcgttctattatagagcctcccattatgggcgcatatatttcgtattaacacaactgtgtgtaaccaactttgaatatattctgcatcatatccataaattttaaccattttctttttaattttaatatgtaaattactataaaacttagaaatatcattgaaattgcaaacttctactacaatccaaaaaggaaatttcccgttatattcttttttataccattcaatataaagttctctattagtatcagaataacttatgctactataaaatttattaagccattttgcgtagtattctggtttattaaaattattagcatatttgtaagctaacgggccgcaattatgcgaaaaatcataagcaagaacagatttaaattccgtttcaatcgtatctagcatagacaataaaatatttcttaattctttatcaaataaataaactgaagaaattttttcaaatgttattccaggtttcaaaatatctttttctctatcttcaaaatatgataaccagtatccacttagtctataatattgaaccttttttaaaaaactaattgcaaatgcctcatcttcaattattatatttttttgtttcatcttttcaatttgaatttggtatgttgtcgccggtttatcctgcctctgcatctacgaacacctctcaaattatataaaacgaccccgcctgttccacattattaagaggtgtgcggggttttattaattaaattataacctatgcatttcattttgtcaacaaaaacaaaacatattagtataacacaaaatacattataaagcaatttacgttttttctcattttagtgtaacatacaacactaaaatgcgcaaatgtaatcaaaaataacccttatagagcattataatcaataaaacgttgcatttctgcggtttttatacaattcgcttggattattacagtttcattacatttttttgttagtcgctttcaaaataaaagccccccgctcaaagcgagggttttcgttttatttcaagaaatagttagctgtgtaataccagccatcagatggataccaaagctctaagtatccttttccgttgttgtaccatgctaatttcgtattaggtgcataccatttaattttgcccgaactcaacttcgtattattccaaaccggaatgcgtaaatcttttgcgcttttaattctaactttgatgcgacctttcgcatcttttttagctacaacatcgcaaaagctcttatacatgtagtataatttgtcgttgatgtacgtcttgtaccaatattgattatgttcgtatactaagaactcagttcccgatttatacatgcggaatggcgacgatttaaagtccatttttggaagcaatggcgcactgtcaacaacttttccatcatgtctgtttttattttgtgatgcacctttcaattttgcattgactgcgtttctgaaacgtgttaattcggaaggtttcgcaacccaaggcgcaggacaattttttccggttacatcgtaatgacggataatgtcactagccgttaaatcgtatgttttgcatagctctgcagctacatcaactgatcgattaaatgttgctgcagtgatattcccgtttttatctaagcacatttcaataccaattgaggttaaattcgcatttccgccgcgatagtaacttgtacttgcttgaagagctgttaatttgcaacttctttcgtttgcatggtatgcaacttcatttagagggataatacaaatagcttcattatcatcaataaaaatatgtgcagaagcgtaacgctcttttaaatctctaaaatatcgtctgtgattatctgcgcttgccccagggtttgcagtatagtgcataacaatcttacttactctaagcaacttatatcctgggcgtgaaaattgatttttattgatataattatattgtagtactgacattatttatcatcctttcttggttctgaataattcattactttcaaactatcggagaatttactagttgttgggtccatcaaaataccgacaacggctacaattgtggtaataattgccattgggctatttaggaaccttacaaacgaaagccacaagacggaccagttatctaaatcagatatagtaaagcctcccgctgtccacgcgacgcctagaactgtaataagagttgccacaacagttcgccagtttttcaatcgtaccttccagttaattttcatcatttcacctccttttcatttttttcagtaacatatttccaaatcgctttatcttcccgtttcaataaagcaatctctttatcgtggtcgttttgcttttctcgtaaactcatacgatctttcttgctttcagacatttcttctctaagactttttaaagttatatcaagagaatctatcatattccgcaaaggtgcgactaatgcccatctaattacaaatcccacaattgccgctattaagctaattaaagctattaactcccccacgctcattcctgctatcgatatgctcccaagtaccaattttcatcatcccctcgttgtcggtccataaaaaataagcctattcggcttttgcttctttcatagcgattatttcatctgcttgtgatctcgttattttttttaaagtaacgaatttattaacatctgctttagtatagtagccaccgacaaaataatcttttactttttcataccaattaatcatctacaaaacacctgcttccgccaaagataatagtaagtttgcattatcttgttgcgtttgttccgtcttctgctcgacttctgctacatacagcattaagtcagcataatcttgcgttaatttttctatttctgatagtggaggagggtccataacacttgcgtcttcaccagcgctccatttttgggtctttacattaaaaactggatttacagaaggaactggcggcgcaattaatgtataaccatctggaaccttttcccctttttccaaaacaattaagtcgtcacgttcaaaaataccgtctgcatcatatttaaaaacttttattaactcgctcatgttgtcacctctttagttaaataaattatgccgtcaagtccagtgttcacgtctaccgagccaacaccaacaatatttatatcagcactcacacttagatatatattcgcttgattacttgctgctgtactctgctgtgcagcggaataaagtttattccagctcgcatcaggagctaaaaaagttggcaatgttgcacatatacctgtcccgttcccggtcccttttcctacaattccgctaacaataactagaaaccggttgccaaacttaatgtatcgagcgactaaaggctgacttgcaacaaatccgttttttggcgtcaaagtaacgctttgcaccgcactagctagttcgaaaaaagtttttgcatcagcaagtgctttatctgctttagcctgtgcgctagatgctgtttcttttgaattccagttagttttatctgctgcggtgacatgaatatccgcattatttacatgcacatttacgtctgttttttgtgcaaattgtgacggattaaagctatcaaattgcgtttgtagattattcgcttctgtctgtagtttactcgtttctgtgtcaatttttgcgtcaagtccagctatttcattatctagccgcacactctcacttgtcacctcatcgtgcaaacctgtaatttctgtttcaacatcagcaatcaaactttctaatcgctcgaaatcacttatataactctcagcaataactttaccttgaagcgggtctttctctacgtaatatgtgaagcgaggcattccgcttagttccgttttatccgctttttgtaaaataaaacgggctgtatcatatacgcccggaacggaaaacgcttcttttacgaaagtatactcgaaatatccttcgctcaatctgctagtatcaaaatgtaaatcgtcaataacataatcgtttgttcccggtaaaactaccgcgaatgtaggcgtataatcggataagttcatgccttttccatcgagaacgattcgcgctgcaattgttaatgaattaatatcgccttgtattgcctcaattcgctcaatactccagctttttctattcaagtccaaagtcgcatttatttttcgtaagttgctcatttattcacctcattcactaatttatttactaagtccttcaactcttttacttctgcttttaatgcttctttttcggcttcattttctttcgcatattgataaagccatgcaacggaattatataaatcaattgcctttccgtctgctgtggtcaatgaatcagaagcttgttccgcgataaaaccgattttcttttcgttagttttatctgcgatatgtgaatacgtataaacatccgtttcagtaataacttgcttagctgttttaccaaacgcagttttctttactttacgtatatttttcttatattcttctgaactagcagtctcaaaattactagctcgatgcggcacataacgtaattgtggacccccgccagagacccacgtgtatctatcgattgaagctgttttcccatccgggttcgcacctatgcaacaccaaccgtcgctttgaatgagaggcgtttcaattcccgcgaacggtgatagtctgacaaccatatcagcatctatcgcacccgtattttcattcacagcttcaatggcaagccctaaatcaccatttgtatttagccttacttgcattgcgggatatggttttgttgtagactgcgcttgtaaattaaatcctgttccaccgcccatctgcagctcttctcggtattgcggtgatggtttactgggtaaaaaactcgaatataaaacatcaaaataaccagctgaacctgtaattgtcacgccttcaatgtcaatagctcttaaagtccctgccgctatcaaatcagctactatcttaccatcttgtgtgagaccaatagtgtattcaccattgtatcctgtttttgaatgacccagccccatttgattaaatctccacaaattgactgctgtactaatattatcagtatccataattaacagttccgctggtttttcaggaggacgaatgatcaagtttccgccttgatttcccgttatttgctttgtcaaatcatctacatattcttgcattcgattgtcgccagcttctatttcatcttttgtagccattcctgcagtcatcgttgattttaaatcactcttgatactcccgacggtacaattaacatattcacctctcaaactgtccatcgtgaactctaccatacgtgcagttgcttcgatgttcaattcagaatgaaatacagaaagcgtatcaccgataaatattctattcatattttgaaacattttatactcttctgtttgtcctaaatcttgaaagcttatttctaaatctaacttaggctcattaatagtattactagaaaaataatttttagatgcattgcgaagtgtgatttcatcaactacgttttcatcagaagaataatcaatttcaacagcgtttatctcatcgcccgttttgtaatccggagagtagatataactctctgacaaagaaataactgtatctgagtcgttcactgttttaatcgcgtaaggcatgattgcatttaccatatcaagcgtatcagtatttatgtttaatcctgtcatattctttctatatgcaatcacaacaccgctgtccgtccctcgttttttcaacattgaaatcttgtttgttgttctttcaatttcaccgcgccatgtatccaaaatagagccttccactccacctatgcacgataatgcattcttaaaacgtagaaacgtactattcaatgtagaaatatctgaataaaattcaatgtttgtaggttcaagtaacgagtctttcaatctattcattgcagttccacatgaaactttatctactttaaattctttaatcattttttttcttaatttatttgtctgatgtgatgctttgatgatgaatgtatcagcaaacaaattcttttctacagtgtctatttcaaaaggattataacctctctgcgaatcaacgaatgcagaaatataacgtccgtttatcaaatcgtgtgcatgggaaccgttgacaggatactctaattcaagttcaaactccgcattcataacttcatgaacttcacaacgcacagtttccgataacgaacaaatcccgctatgcaggaactctgtttcatctgcttcatataaaagcggtatatttaaattacgctcgaccatcttgtcgtcacctgcactttcgaaacatttccgctccaagaaattgtattttcttctaaatcaaaaaacggaaacgcatttttactataatatttattgtttattgacacataagcattatctatcaattgatatacttctctcacttcactatctattccgtaatttccttgaagtaagtttttaaatataaattcatttccgttcacattgatagtaatatctcccgaacctgaaaattcaatgagcggttgagaaatgaaagaattcattttataaattttagcgccgttttcaattatagtaggatagatacctgacaaatcattttttagaggcgagcaagtgacttttgctgtgaaaggtacaccttcgatataacttgtttgataggataaagttatttctgtgaattttacagaataataatagttttcatcgaaatagaatttcgctagatggttcactgagtcttgcagtttagaagtgatttgataatactcatcaatagcagtttctgtattttgcgctttcaagaataatgataatgtaaattcgacaggtgagtaagtcccgtcccaattcgtcaatgggaggaatcttcccggaatttctacaagtgtttcatttctttcagctcgcggaatttccggtcgttcttgaatgtatacattattttcataaaaatttataccgttaaaaataaattctccatctctcatattgtcacaccgcccatgctactatctttccgtcttgtttgttcaacaagaattttttgcatttctttcttcattaaattaatcattgacttgtccacattgccattcacattgatagtcaaatcgtatgtgtctccaccactttgcggcattgtgtcagcaatcattttccctatcgtgcctaaattttttgcgtttaacggcaacacagcttcttttccagcttctccgccgaccatggcagaacttccattcatgccaaacatggtaggttttgttaaaattccaccttttgcgtaccaatctacatctatgcctgacgggaattttatctccttaccgaagaccttttttgtgcttgtttttaaactgaaatgtggtaagtcgggcattgatggtttaggaatttttaaaatcaggtttttgaaaaatcctttaattttatcaacaattcttttcacactgtcttttgctttttcaatcggatcaatgattgatttttttattgaatcaaatttttctttaactgccctttttgcgtcatcaaatttttctttaatagaagaaaccagattactgattttctctcttactttattgtacgcttcgacgatagggtcaatcattctttgtttcaacgctgcccatgcagcttttgtaatagctttagcaaactcccatttttcttttatccaatttgctaaatcagtaaatttttgcctaacgtagttataagctgcaatgacaggatcaatcatatattccttaaatagcaaccaagcaacttttgtaatgagttttacttgttcccatttttcttttatccaattcactatttttttaaatatatcctgaacccatttccacacgttttttaaagggtcaattataaacgtttcgaacgctccccaagccacttgagtcaccgcaacaattgccaaccacgccgcttcaattagagtagtaattaagctgattatcgggtctaagaaagtcattaacccgtcccaaacagcgacaatagtatccacaatagactgccaaacttccgaagcagttgtttttattagttcccatttttctttgaaccattcaataatcgggtcccaaaactccatccatttttcttttaatccattccaaatatttgcgaaaaactcaacaataccgttccaaatatcatagttccatttagcccacgcaatgaaaagatccatgagccattgcttgattccttcccatgcatctgaaaaaatttgcttaacattttcccataaatcactgaaaaagtctgctatcgtttcccaaacgcctttcaaccaatcgacaatagcgccccagttttttataattagaatgacggcggctattgctgcggctattgcagcaatgacggcaatcacagtacccacaacgcttcctaatattacaaacgcagcaattactggagccaatgcagatacaattgacataataactgtaaacacccctgtcattattcctacaaattccatgactttcttcgaaaacgggcttaattcatcaaaccatttttttaaatctttaattacacttacaactttcgggactattgtattagctagttccaataaatattctcctattggcgcgagtgccgtttgtaattcatgccacattttagttaagtcttgtttgctatttgtctctgtcaatttttctgatgcgccttttacatcatcatatttcccttgtactgcacctagctcaccatttaaatcgcccatcgcagttaaaacttttacagtattgtcttctccgagagacccaaatattgctgatacaatagatgccctttcttgttcatctccaactttatttatttcagtagccaaattagcgaaaatttcattgttatcgtagccatcctttttcatgtccgcatacatggttttccactttccgcccagaccttcgacagctttttctatcgagtcatctgacacacgaatcccaaattcttttactaaatcattaaccttgtctaaattataagcgcctgaatccaagccagcctctaaagtttcgaacatcccttgtgcgctatagccgttttgcttgaactgcccggaatattctgctagattgtcccccaattcgtccgttttattgagtccgttttgcgctcctacagtcattaaatcaaatgattgttcagcggacagcccgtaggtttccatcaaagcattagcgccgcgcaacgtttcattcatatcagaatcaaatgttttagaaaatgcaagtgctttttctgtcacactttctagatctgttgagttgaggtcattcaattgtcttttcgtttgagtcagcgcttcgccagcttcctcatatgaatcaactaaaccagtattgtaaaagtccacaatcgtatctttagtttttttcgcttccttgccaaccagaccgaaatttttgttaaatttccctgttgcagcgtctgcatccaaagcgctgtcaaatgaagctttccctaattctatgactttatcagtcacaccttgaacagcttcggctccttctaacaatattccagtgtccattttcttactcataccttcgagagcttcaccagtttcattactttgtgtcgataaactttttaaatctgtttctacactttgaatactttttccatcatctactgtatccaacgcatttttcatcttaccaacatcaacatcagttcctaatgccgctcgaccgattttatttattgcttcttctaattggtcagacgtggctgtaccattgcgaattgcgttagtcagtctaccgcctaaaatgtccgcaaaatcatccacactggaacccgttgcatcaaataaagtattaattctttttgtgttttgacctaatttttcttgttctacttgtatgttatttaattgtcctttgtaaccattcaaagcgccttctgtatactcgatttcacgtctaaaagctcgatattgttcttcaccaatttcaccacttttaaactgtgcttctacttgactttctgcttgctttagttgatttaatttttgagtagttgtctctatttgctttgtcaaaagttgctgtttttgtgcaagtgcttcaacattgcctgggttaaatttcaatagtttttcaacatctttcaattcactggttagcttagcggattgagtgttaacactttttaaagctgaattcaacccttttgtatcgccatcaacttcaattgtaataccttgtattctaccttttgccaatttatttccacctcctaaaatgcatcgaagtctgcttgtgatgctcttctagcttttttctttttattcggattttgcgcttcttcatattctgcaaagtaatccaaacaagagcctaaagtcatcatttctaaatcatcaatcgtcaatccaacttgcttgcaaatataaaaaaacgactcagcggttagcggttcatcgctagcgcttcgagacgtgtctgttacttttttttagtttgaatacttgcagcaaggagatcttcaatttcgggcatgatttccacaattgggaatgaatcaaatccatccaaccattctaacggttccggaatagtaggattagcagttttagcaagaacccagataaaattataaaggatctcaaaatccagaagtgataaatcactatccgctaaattagtcatttttttattttttttcattggttcaatagcttttgtcattttcaataattcaccaaaataatctttaccaaattgttgtttgtatctaagtactgtagcccctgtacttttaagcgggattttcttaccatcaacttctattgttttttccatttctcatcctcctaaatattaaaaaaaagaacctagaaaaattctaggctcccgctggtgttttttcataaactgctttataccaattgttgtaaatttcatcaggtactcccgccgctgtttttgttttaactgctttatctgttgcgcgtggtcctgctgaaaatgaaagctcattcgtgttaggttctacagaatcagttttagtagaagatgcaacggttggtctgctagcagtacaattgtacagaacttgacgaactgattttacatcaccatcaaattcaaataacaaagcgaatggtttcggtttagcatccgatttttcggtaagtacgccatccacagtgtccagttcttcccctaagcaatctgttgcaaaaccttcgggaatacttgcaattgtcaatgttccttcgtatccttggttatttggcgcttgataataaacaatgttgtccgcataaaatttaatcatatctccttgtggttctacggaaatttctactccgcccggtaatggtttaggagtatcgtatgtgattaccccatcggtttcactgtatgttgcgtaatgtacattttcaagtccgaataatactttattttcttgtccttccatttaaatcatcctcacataataatattttacaaacattttttcttcctctatccattctgtttgagaggaattgaaaggcagtttgtttgccattaaagcattttctaaaagtaattctgctgatggtgttttatattctgtatacagttcgatggtgtaatttgatattttttttaacacaatattatccgccatcaagttgacactgtcagactcgttatatgtcagatatggaagagcgggaattggtgtgttgtccgtttcggtgaagtggttgtatgcgacaggtagtcctgtttcgcttaaaacatcttttaagttcatcgtctcaacgccctttccgcttctctaacatattcttgtattacttcttgttccactggctcaatatgtttgtaagctttaactcttcctccgcctcgtttagcatgaccgttttccaagaggtgagttttaccagggtcggaagcattgtaaataacatatcctgtggcagtctttttagctttccatcctctcgcgtatctacctttttttacagggcttctttgttgtagttttttcgtagcattagttgcgacttttttttgaatcgtttctagttcttgttcaacatctttagtgtatgttttcaacacatcagcgatagcgttatttaatccttttatcttcaagtcaaatcaccgccctcctaaatcacgttcacaagtaagttctagtctttctgaatcaacgctatatgttcgaataattacatactgtttgttttcaaaaacaagtttcgtttggttcccatattcatacccatgaatattcaaaacgagggatggtttaaaccctctagtactcgcctcgtaaaactcttgacgtgtaacatttttcttctcacatagtattttaatttcagttgactgtggtatttgatttcctatctcatcagtaacaagtttttctgatactaaagttacttcatcattccaattcattcacatacacctctcgatattgaataataagattatgcaaacgatactgtaaatgacgaggcatgttttcagagtcacgattgttgtatctccaagacgtataatcaactacaaacattaaatgattcgcatcatcaacatttaaaacaatgcttttttcattttctaactcttgaattactccgtcgattatcgcaagtaaataggtatctctaacattgctagaaataccttctcttgcttttacaagttctaaaattgtatcggtatccatcacttatcactttctaactctgtaataagtggttcacctagtttattatcagatgacattaatttatctatacgaggtttttttggtttcccacgaaaagggtatttgtcccctttacgataaatatgtttttcatcttctaaatcagagaaactttttagcacaacatatttactcatattctcacgctccttgtgtaaatgttaagaagtacccagcattggaatctgcttgttttacatcaaagcgagtgccaacttgtagatattgaccgtaaatttcgttatctacccaacgcgcggtaatgtctacacgatccgcaaatagaacagcacgttttaaatcgcctaagaatgcatgtgcttctcctgctagtcctagaagttcgtcattaacaacctctaatttgattccgaacaaagaagttccagacggcgaagtaatatcacgatgtaaaatatattgaccgtcagagtctttcaaagtatcgacccattgcaagaagctttgagatacgaccgcattacgttcatacgcagggtctaatgtcacatttaaaatttgtttaatatcatctgtatctgttacagctttagcggtgaatgtttttaatacttctgaaatagcataatttgttgtattgattttttgttcttgtgcgttttcagatacgatactaaccaagtcaactgctgcgtcgtcaattgattcttgagaaatcggaatagcaccacgataagttacaacttcccaattaatttgctcaaattcaggttttgctaattgaggattggcttctaattcaggtacagaatttaatcgagcagtagcacgttttaaaatcggatatttaccggaagcggtgctaacttttgttttagatactaattcagctaaattagtgacagtcttaacttctttttcaggtgaataaataatttcttctggaatgataacccctgcatcagtagatactaatccagctcttgtttgaccctttgttcgaataaatgtatttactgcactacgtacttctttatctttatattttcccatgcgttcttcgccctctcctttttcttcgtctttagaagcgttaggtttgtcatttgcttcttcaagttctttttctaactcttcaatttttgctgttaattcgtcacgctctttttctaatttttctttttcggtttctaattcatcgacacttttttcaactgtctcaacttcttcttctgtttttgcttcttcaagtgcgcgagttaatacgccttcttgttctttaaaagatttagaacgagtttctaattcctctaattcaccgcgttttgaatctaattttttttgaatcattaattgttttaatgccataatttcaatctctcctttaattgatttttttttgcttccagttttcttttctcatgccttttgacatcattttgtcttgcttcaacacctgtatccgaataagccggaaatgtacaaacagaaacttcatgtagttctacttcttctaacgaccatttgactgaaccatcgtctcgccattcttcttgttcttttatgatgttgaaaccaaaactacactggctcacatcgcctctttttactcgttcgtatagattaattgcatcggagtccaaagggttaatttttatctgaccccaaagtcctttatcatctacacgaagagagagagtcttagatacatttcgtcccagcacaagtgccgtatcatggttaattaaagctctgacatcattttctaacgtattatcaaatgcaccgggtaatatttcttcaaatgcgccggggaataattctgtttcagaattaaaaacagcgaaatagccttcaatgactttttcgctttcatctgtttcatttgtattaagttctgctcgtctattgactatttgacgttctccatttctattagtcattcatcatcacctcctttaagcttgttttgacttcctagcttttcagaaggaataaagttttctaatgcaagtaattcctccatatcctcacgtggtgccatgccaatccaatcgcgaagttcgtttctatccattgcgattctatccaccatttgcccacctgctgcgactaattccgtaatgtcatatgaatacaaacttcgaggatttagtttgaaaaatcgtgttggactgattaataaatctctagtcaacgtttgcgagataatcattgcgattgacatgattcgtgtattaataaaattattaaactcgtttttgtcaaactctcctacaccaacaaaaaaagcaggtactcctaagagtcccgccaccgttttcttatcaatatttactgcttcattaatagcaatgtcatttaaacttaaaggtttaacttgttctatttctattaaatccgccggaattatccaaggttttccttcttccgttcgctgcaaatacatatcttcaattttgtttttgcctttttctgatgacaattctgctgcatttgcatctacttttacaattaagttcggcataaatttactgctcataaatgccttcttcgttgctgttgcctgatttaaattatccacaagtgattttaaagctaccctgtaacctgttccgataaacggatattccgagtctggattaatagcgaaatggaccacttcgtcgggattgtatgttttgtttttataatgaatcttgtacgaatcatctcttacatcgaagtcaactaaagatgggtcaagcggttttaattcactaatcagtccgttttttatctccggtaaaacaatcgcatttccatcaccgtaaagtaataaattagatacgatattataaatccatgtctttcgagtcatcagggagtacggattaatatcaatctttcgagacaattcgtctctaattctaatatctcccttttctgtattttccatcaaatgcactgtcatattcgagactaagtctgctattttatcgacggcaattttcacctctgcattatcggaaagcttagtatatccgctattcaatgcaaaattataagactctccattccaaacaaagccaaaatcttgagaccttttctttttccacggaactttaattctccaattcatttgttcacctccctcaattcgaatttagccatttgcttgctactgcactcatttgtatatcttctaacatttgtaccgctccaaaaactgcggcgtcaaacaaatcaatacgttgtgagccgccgtcaccatccactttttcgtattgaatcatgtcatccgttttttcaatagcgcggacgttttgaacacaatattcaaatgattgattatgacaataatagaaatgcccatcttttgctttcgtctcaatacgtctaaacccttccgattttttataaaaatattgcggttgatctactatttttatgccactctttttcatcagataaaagaattcacgaccaaactttttgtcaaagcctactagtttaatgtcgaaacctttatttttcatttctttaaaccagttgactatcactgcaaaattggtagtcggggtgttcgtcattgtcaatactccatcatctttccaaccgaaaagcggaatattatcttcatccgcttttttatttgccatcacaattggaaagaaggcatgtgtgataacgatgtctacctctgtaccatcatccattacatatcttccataaagtgccgccgctgttaaatcgtgaagttttgccaagtcggcaccgccgtaccatttaatcggtagttttgctaattcttctaaggtccagttatattttgaatcagatgctttaaattcatcaatattaaaatacgctttcattgcgctagtatatatatttaaagatttagataaaaaatcttttctctgttgtggatcgttttgcgcttgcaaactgtcattcgtcatatcagcaggtctaatagtgattccgtaatttggatttgctttttcgtgttgttttgggtctgtataatccacttcgcctttttcgtcttcatccgcttttgctataaaaacaaaataagcctcatctttcacagtgtcgtctaaaatctttttgcaatactgtaaacgttgataacaaaaagaactcatattatcaccagccgtagtgataccaatcatcaatttatttgtatatgctttcattgcttctttaatgatgttgtattgtttaggcgttttatacgcatgtaattcatctgcaattcctacattacaattaagggagtcttggcggtctggattagcagctaaagctttgatgtataaagagccatctccgaaatcaccagaaatgctatgttcttgattattatctaaaacacgaaatgaatcctcttctcccatttctttaatattgaagttaataaaattaaagctttgtaaagattgttcaagagccgcgccaacgatataaatttttgaccctgactttctttctaaaagtgctaacgcccacgataatgctgcaacaaatctagtcttaccattttttcgaggtaaaaaaataaacgcttctttgaaacgtctaatgattgtaccctttatataaaatcccaataaggagtaaataataaatttttgccacggttctaaaataaacggtgtccctcgaagcggggttccgtcaattctttccccttgatcatgaacaaaagttctttcgataataccgataacaaattctgcgtctttaggattgaactcatattctttattcttcaaatctcttttaaatcttttcgccgcttgttgtatttctttccccgctatttttttgcctttcacaacttcatttacataattcatcacactatcgtaattaaaaaaatcttttgcagtcatcgcatttcactcaatatatctgctaaactagattgctttttattttcagtcgtgatgttttcgattgctcgcgggtttaaacacaatcggtcagaataagcaatgatgtcttttcttagattttccagagttgcaacaatagcagatttttttgttccgcccgctgcggttgaagtttcatattgataatcagagtcaataaatttcttttgcgcgtcgtcatactgagttaataaatcacagtaaatagtaatgatgttatcatattccgttttataaactcctaaacctttcatatctttaatcactctttcctttacagagagaggtttgtatttttctatgctttcaactttactcttttttgccattgaagttcctccttcctaaaaaagttttctcatcattgcgctattggaaaaagtccccaccctcggtatccccagagcttttttctgaaacgtttgacgggggggatgaataaaatgactcgaattccttttttcgtttttcttgccatatcaagcctttcgctgtcagttcgtgagttcctctcttatgcattgaattatgtgaacgatttgataaagaaattaaattccagtcctcaaatgctaattcaggatattcttctttcgtaaagatgtgatggaccatctcagctgattctgttcgtccgaaacgcctcgactcctgacaaaggtattcatctcgtcgcagtatcttcttccgttttcgtttccactttgatgttaagtagaatggatctgttgctttataagacattcgctagttcgctcctatataaaagcccaacactaatgtgctggacttcattgttctatgtatccgtagttatgaaaccacttaaacttctacggtatcactcgtcagcgataggtttttatcttgcactactcgccgtgttgtcttacctttggctttcacaagggtggaccctataaaaccttcccatcagaacgtatctgcaattaaattgagggaaggtattgtcgttaatatactcggcaaggatttgcacctcgcatgaagtcaacggtttactaagcagcatagcaacctcctgctatgtcatcatgtgattatagatgctcagttccgtctaacagttcatgttccattgcttcgatttcattatctgaagcaacacctttaatcgctgatatgtgagacatcttatttgttcttgagtaataagacggaatgaacccattatgtttgtttcttagttcttgacgttctttatataatgctttaatagaaggaacaagacgtctaatattttgttcaataaatctagttggtattctaataatttcccaaccgtgttcagatttattcaaagtattaaggataaacacatctcgttctgaatctttaccaatcctaaaacgatggtgccctccatcaatctctaatacaaccttcatgtctggcaaaataaaatctactcgtttgcgccctattctttgttgtgtttttactttaatctgacttcttaacaattcgatacaagccattacttcatgggcagaatcaaacttgctactgtcatttctataaaattgggctactgtattatatgggtcaaggtattcatccattttcatactacagcattcttgcatttctataagatgtattgctctttcaagtgttgcttcgattttgtgcgcaatatattcttttttcttttcttctattttttttcgatacttatgttggcattcaacgcataagtttctaccgccagacaaatctctgaaatgtacggaagcttcctgcgaaatatattgctcgcattcccaacacctaactaaattcatatagtcccctcgactttcatttttaataggccctgcctataatactataataaacttattttattgttcaaaacgggcataaaacgggcaatatattttaatatcccaacctttcagctattgaaagaatgattgttttatttcttcttctagctgtactctcgtccatattcaacttactagcaatccatacccacgtcggtttgcttctgtcccagtatctaaactgaatcaattgtttatcctcgtcgttcaatctattaagcacagactcaattgcatttataatattctttaatctacttatctctttatccatttgcagtaacatcacacgatcttccacttcattactaatattccctgcactgccaccaccttggttctcgtcaatgtattctctatgccaagcgcccagtgttacattaacttccttttccatcaattcttttttagtagaatgataaaattttaattcatcttcaatcaatttatattgtgctttacgtaatcgttttgacatttaatcactctcctaataaaattctatctcacacgttttgcctagtatttgttcaattagttttttcagttcttccttgttgacatgcgccgtgtaatactcttcattttgatttccaaatatcgttgtaaagttaataaactgttttagaaattctttagcatctctttcgtatctatcattttcaaacatttttaacatttcatatttatctaaactgatatttacatattcctccattgtcaaccagccccatttttttatattttagcaatacttgtaaaggcgaagagtcacttgtcatttacaactctcattcatattctcaaccatgataagagaaatgattaatagtaaattaaactctgcttctgcgagactaaaaaagccaaaagcacgcaataacacggtaatgaaaatcatagaaaaataaaatgaacttaatgttttaaacattcaatcactctccatccattcaatcaaattatttaaataaaattgcgctttttttaaatcctcaatgccattcttgtgctcgtatcttgagacatatttaagtatgtttcctacagcatatgacggataatcatttactttagctttaatgtagtcaagcgtttcaataccgcctgctgtgtaatgtgcaggattatttactttgtcgttattttcgtttttcatagatactccattggatgaaaatgctttcatggcatttgtagcgccaccgaaccactttgcaacttcgtcttgtttcactttgtatttttcaattggtgtgttggggtgtaaatatttagcataagaaagactcccccaacttactccttcttcctctatatgcacaacagtatcttgcttataccgttcccaaagttccgagtcatatgacggaataacctctccgaaaaaccagctatacccttcatttttcaattcttccaataaagcatcaaaatcttcttgtgtttctgtgtgatatattttcatttgtttatcctccttatttaatgggattgtcgcatcaagactcatagtttcaatgtacatcccttgattaaatttccatttgtttataaatttccgaaaccagttaaacattgttatccctccactattttcaaagcttcctctgcactcctagcaactccacaaatagctggtgttatttccatcgcttgttgaaagtttttctgttcttgtcgtaatttccctatctcatttttcacttcaataaaaaacatttttccatctgttccgcgaaatccgaataaatctggaaagcctttcggtaatcctgtatcaaatattcgtccgtttggcattctaactttgcccacgttggctctgaaaacataatgcccatggcgggaaagttctaaacgtatagaattctgtatatctatttctgccgtcatttgatcactcctttggtcaaattggtgaaaaaggtggatagttggtggatagttgaaacaaaccctccacctctgaaatccattggtatcactacctttataactacttcttttttaaaaggtggatagttggtagtaaaataggaaaagtattactaggaggaaaaaagtagaaggtttatggaaaaacacccaaactatccacctcctaagaaattaagtagccaaaaccattgcgcctctaaggctaaaggagggtggatagttgaaacaaaccctccaccttttttaaaaatttaagttcaaattataataatcgtcatttaaagtaatgccctcgtatacatttgcggttttagtttttttcttagtaaacttcattccaatttctttcccaaatttcgtactactcattaaatattgaccgttttctttcgcccactcatgatatgtttcatacatttttttggcatttaccttttcgccttctctcacatcacaacaatcctcaataaatgcagtaataacatccatttctgatttatattcagagctagcattttcaactgctttcggcatccccaagccttccttttgccatttaaggaagccttctacagcccagttcaatatcccagttaattcactgcggagtttatattttagctgtttatctactttttcgtcaggaatttttactgtgaaaggtactaaatgtaatcgacgccaaattccatcatctctccctcgaataattggtttgtggttggttgccatccagattttgaattctggcgtgaattcaaattcatctttatatagatgacgtgcagtgaccttgtcgccacctgtgagctgtttaactagtccttcgtctaaacgcacaccctcgtttggttcagtggttgtaacaaacctggctccatgtaatcgggcaatatcactatttgcattactggattgctgtttgaccatgattgtttgcggctgtatattggttgcataagaaccgaaaatgtcattgataatgtcgagaaaaacagacttcccattacgtccatttccgaaaaggataaacattacttgctccgatgtagatccagagagagaataaccgactgctttttgcatataattgattaactctttatcgcctgcaaaaatatcatttaaaaacgcttgccaaagcggtgcgtcaattttatctgtatattcgatgttgctgatttttgtaaacattttttgcctatcatgattgataagctcaccattttgcaaattgatatatccattttgtgtgttcaaaaaatatttgtagcgatcgaattcttcgggcaaaactggcattaaatgttgcgcttctttcaacatgttcgtttttcctttattgcttctagttgcttttaagtgcttcatgaacgctttttctgcatctgattcattatccatgtaagcaaattcgcttttcatatctttaattacatcatcgacaagtgtttttacagcccctatattatcgtatttccacacttttgaatcgtagtaataaaaccctttgttaatgtatgaaaaacggacaatatcatgaaatttatcacgaaaacgttctgcattaccagtatcatccagcccatatactttacgtgctgtattattctgatttttgatagaaatagaatatccttctagttcactgccaggttggtaaatttcagaggtattagttatagctttattaataaccatttcaccgtaaagttgcgcaccgcgtttttggtcccattttgttcgatacaaaccacttgaacggaaaatttcgtccattttttctgcattacatcctgtccaaaatgccagcatatttgcaaaagctaagtctgcttcggattgcgagggatatagtccatcccataatccatcgtaaagcgttttaaattgtgcgccttgtttgcttcgttcagcacgttgaataatatcgcttacaggcaaatcaactgtagattgtaaattatttatttgtcttacttcatttgttccgatgtatttcgtatgcaaatattgaatagcggatgtcgcttcattgacttgtctgtagttatcaattacttgacctgtcataacgaaaaatcgaccgtccgggtacatttcaatgtttcctttacgccgaccaccttccgggaaactgccttttgcaataatatgaattcctgtcccgctcacactgtattctgtgtaactagacagtgtttgaataaattcaccagcaatattttctgtattaccataaaggtaatcttcaatttcatcctttatatcatcaatatccacaccaaaatatggtttcttaaagtaaaaacctaacccatcaaaacgatatttttcaagggaatcaagggcagtttcaaaatctgcccatgtccgctcgtctacactattaccgtatgaaccgttgtttgcgttcatcggtatttttttgtttttgccacgctcttcatcccaaacaagttgaaaagcgcaccattgttttaatttttttaattcgtccggaatttgttcatacacgtttgtgcgctcctctcattgcttagaacggtagattactctcgtttatttctggcataggttcagcatctttctttttaaatacatgttgtaatggtccagtaattttactttcagcccacgctttcacatttaaatttttataaatttgaccattatactcagactcttcatttttcacagtaacttggcatgtcttagttaacaggtcttttaataattcatccaatgtattataatctttgccgttaggtaattggattgctttagcgattgtatttaatgccgtttgactatattcatttgttgcttttgctttccatactcggtgaaaaatatgcgcattctggaatttttgatttacatcattacgaataattaaatcaatattaatgaactccgctccgttttttgtcgcatcttcatttgcgttgtataaaaccacctcatacgtaccattttctactccatttgtgaaaacatcattatgatctactttaaacatttttaaattccttctttcgtttttatttgataaatcctcttgcttttccttgatggaatgcccatcctcttttataattgtgttcttttgcatattcatataattctttcatgttcgtacattcgcttggactactataattcactttaaaaactgcttctgttatttcttgtagctctgctgcctcatcaacttgcattggttttacttctactttgaattcatgtccacaatgcgagcattttatattagtagataaaactgtcataaaacagtcagggcaaatttttacaggtgcttctgctttgttgctgttacttccttttttcgcttctaaggaccattttcgttccatgtctggcaaaccaaagcgattgacatttccaacgtggtcaataataatagctgttttaccagttcggtatcgcatacctcgcattgattgctgaatatacagggatagagattgagttggtcttagcataatcacagtagaacagtctggaacatcgaatccttcaccaattaaatctaagttgcaaagcacctttatttcgccttctcgaaatcgttgtataatgtcatcacgaatggatttaggtgttttcccgtcaatatgtgcggatgtaatgcctactgattcaaaactcattgccattttttcgctttgataaagagaagaggcataaagtattgcttgttctccgtttgctaacttttgataatgtttgatgacatcgccccaaatcattcttttattgaattgatcatcaagtcctgtcatgtcaaattcaccagttcgtttgatatctaatgtttctgtttgaacgatttcgggagcaaaatatttgtaaggtgctaagaattgattttcaattaaccatttcacattaaccttttcgattaacatatcgtttatatctcctaaaccacccccatttattctcactggtgttgctgtaaatccgaccactttagcattagaaaagtgattgattatttttttataactgtttgctagcacatgatgactttcatcaataatgattaaagctggctcggaagttttttctaaacgtctaacaacagtttgaaccatccccaaattgacgaatttcatgtcaacatcattcatagtgagtgtatttctgatttggtcaatcaattcttttctgtgaactaggaaaagaacattatttttattgcgcgttgtcatgcgaattatttctgataaaataactgatttaccagcgcctagccacagggagcaacaacgcacggtctgttatatccctgtaaaaaagccccctttacatcatttataatttcttgttgatattctctaagctttaacatcaacatcacctatttggaataggtcttcttgcaaggcaaactctctattatctagctgattttttgcaaaattaccattgttttctgtgagtaagaaacccctctgacctgtttcaggatttcttattaatcttgcgactataggaacaattcccataacgtgattaactaccttttctctaatgtcaggcaaaaattgattatacagttgcccactttccatctgtatttgacgcgtgttttcccaagctgtatatactatatttgtgtttggtaaattattaaacacggaaatcaaatctattaaatgtgtgtcaaatattccatagtgttgtagttctggttgacctgattttgtatttctcccattaaacattaaccataatttttgataatggcttaaattatcaattactacattgtcatattcctctgcatgtgccttcgcatatccataaaaatcagccatatcttgtacgggatttcgaggatctaatgtcgcaatcgtgatattaggtaatccacttaatactttcgacgtaccatcacaatccaacattaatgtttttccttctaaatacttaatcgtcgttgttttccctgctcccggttttgcataaatcataatattaaaatactccgaccttttcattttttctgattgaataaattccaatgaaatccctccttattttatttgtagtctttctgtttgaaccaaaacagctcccggcacatcaatgcctttttttaagtcatcttttaacttagttttatccagctttttaggttgctcaactaaataattaattagcttactctcatcttctacaaacacactgtgagggtttttccgaatatctaatgtaaataaattcgtttttattttttgcttattagcaactagcatagcatcatgtagtgattgtttcagtcgcttcacattattgttaatcgtgttttttcgttctgataaacgtttaatttctacatctaaaataagtgattgcccttctaattctttaatgacaaacgcaacattttctgcttttgtttctaattcatcttcaatgctttcaagggtatcttttaatgcctccggatctaattgctcagctaaatttaataactgttgatacttttcttgaatggaataaagtgttgtcatattaatcatctcctttcaaaaatgctgttgctgttattttgccttttgatgcagaataccacttcacattgtttctttcgtcaaattgtggcttatttacattagatacaaacatcttagctttatctgtatctgcattatatatactaaaacttactgagtctgattgttcatatagctcatttactaattgactattcctattttctttcattttcttgacttgagttgttggtatgttaaaggatgaaaatccgtcttcatcttcaacagtaagcagaccattgttgttaatcagaacatgaaactgctctccgtctacacataattcagctacccctgccctatcctgcacttctactttatcgcccggccggatactcatttaatcgcctccaattcatttttatagtcccacatttcttgtgataatttatccagcccaatcgcgaaacgttcgagatcgcgtggtgttttaataatggatttacttagctctttgcttttcctgtgaagtaaactgtttgcttcgttgatgattatttgttcggtcattgtttttcaacctcctctgcaacaatactaaaatctgtttcatcatttatacgctcaatcatttcgtcaattgactttgaacatttaataatttgtttcactttatatttgtgtttattcacacgatttacagaacatatgttacctagcctttttaaaatagatgtttttaaatcttcagatgacacatcatattttgtgaaatcaattagcttacgttttacgctattttcaaaagcggaaagtgtgatatggtagtttgtcatgacaccgctcagaagtgatatacaatatttcagataaatcagccacgaatatttgtctagaactttcatcaaaataattgaattcggctcttactatattttctgtgtgtttatgtctgtaaattcctaaactgtccgtttcaattgttgttgctattgaacttccatttttaaaatgataagttaaaatactttttctgttcattcttcaaaaacatagcttgcaaaatttttatcatcttcatcgcaagttccgagaaagccatctacatcgtaatatctggatttagcccaaacagcataacgtattggaacaagttctacacatctctcgtgaaaccatccatggggatctacgttaattatgtcatcatattcactaaaagcttcttcacatacgccacatcttactaatttagtcattattccaaactccttccgcacattggacagtaattgatattcctagctgttaaaccgtagtagctgaaaactcctaagttgccagtgctatctagtctaacaacaccaggttctttatactcttcatcaaaacttagtaaaggctcattattcatcatagagtcattcttgcaatactcacacattattccgacacctctctctttcttgctctcacaagtgctgtagcggttcctccagatagatagttccaatcagaagaggagtatgtgctgaaatgcacttcgataatctcgtgcgttttggaaagctcatttaattgattgtctatgtttacgaatttcgtttgagactctctgtatcccacaaattcaaaccattcctcgttcattctgccacctcttccgttatccagtacggacttttttcgtagaacttcttcacttctctgttaagtgagcgtgtcatgctttccaataaggttgctttagtccccatatttacatgttttcttttcgctttaacaatgtaattcaattcgcctttttctgtaactgtaataagaccaataccgctatttttcaaacgagtgtcaaataacttgaagtttaaactgttaaaggattttgctgtgtgatctctcaaaacttcaagcagatgctctggaataacatagtagttaaaatctccgtgaaacgataagcttgctttacttttaaagtctgaaaggcttactttgatttcatagcagagaaactcaccagtcgttttgtatgctataaagtccactatttctttgccgaaccaaccaatcgttacttcaaatgcaccgaaaaccccttgctttgcatgagctttccaaagcgcttcttccactcttctcgtgtcgtttgttttgctcattccgccacctcgctaacagtttccgcatcaacttcataacacgtcttgattaccggaatagcgctatatccatcattctcaacggttataatatatgcacaatcacagtcatccatgacaaagtatccgtgcgcccatttgccgttgtctttgcgctttcctttgaatttaatgtcactcatgcctcaccctcctatctcaaattaaatcagcatcaattagtaaaatcgtttcattggcagtttcataaaacccttgttttatttcttcctcggtttcatattcttgcaaggatgacatgaagagtttcagtgctttttgctctgttacttcaacggaattgaattcaatcattagtccagtttttgcaaattcgtcttcgtgcttaacaacatcacgccagtatacaaaatcagcttgttttttgctttctgctttaattagcgcataatattcgttttcttctcgtgtgtattcgaagtatttgctcatgcttcagcctccacttctactaaactgatttctactatttcgtcagaaccatttaaagcacagttattttctgctgtttctcggtttacaaataagcaatctttagacagattagcatcataccaactgtgtggaaaatgtttgtacaagccatcttgcttgattgcatacaagtttttactcattgtcttcaccctccacttcctccaagtaatcctcaagtctgtattctttagcttccgaatcgtccatccagccgtcatcaccatttagtcgataataaaatactaccggttgctcttcataacaatttccacagaataaatcttcacgtacttttaataaatatgagccttcttcaatttcttgtttgcacattgtacagataacagattcttgttttgtcgcgctttcgtctaaaatcaattcctctctactgcaaaacaccaaatcgctaaatccaaaatcaaccgcgcactccatttctggtggtctaaaatcgttaatgctaactaccttcccaataacatttttatctttaatccaagtaactttatctcctactttgaaattcatgcttgttcctccttgatttttttagagttaatataatgcgaatatgtcgcatctgcttcttttcgccaaccgttcatctcgttttttgattcccttctataattgattctgtgatttcttatatagtttttaattaaacaataaggcaaattcatttctgctgaaatctctttgattgtgtacccttgatttccaagatgacgaatcattttgtcatcttttttagacatgtgtttgtttgtcagtcctaacagtacctttcttgccgctacagaggcttttgttcttcttaatcgttcagctaattggtcattcgacataataatataattattttttagtatctcatcttcttttttggtccacggacgcctaataaaagaaactgaagaatctctttttcttaacttcgctagtctgtttataactgcatcttttgtacgtcctaaaaattcggcagctttgctaatattgtcgtcgttttcataaacaaaatactctaaataaatatcctcatcttctgtccacaccgagtttttactgattccaagtcgcaccgctttgttttttattgaatgataagagcgatttaaaaaattagctattatttcagtgtctacgtattcgtaattattctgtaaaactctgatttcctcatccgtccaattttttcgcatctaatcacctcactaagcaatctgcatcaaaacagataacattttttgatcatctttcttttgtaattcgtctaacacatgcgcataagtttcttgtgtgacacctacgtcagcatgtcctaatcgtgctgaaatcgtatgaatcgaaacaccttctgccaacaatacacttgcatgcgtatgccgtaatgcgtgaaagctaatctgtgtaatgcctgtttcattgcatttaacagctaaaaaattgttgatggttgaattgaattgacgtttgtaagtgccgtctccaaatttttcaacgaaaatgggttcgtcttctggaaaatcttttataagcggtttgaactgtccgacaatctgccaatcaattttaatggtccttactgacgataatgttttcgttttagcaaatcccttgttatatttgtaatcccatgttttgttgatagatatagtctgtgctgtccaatcaaaatccgctggagtgatagctaaagcttctgcatagcgcattccggtcttagctgcgagcattacgaaccatccaaatccaatttggctcatatcgagtgattgtaataacttcgataactcctctttctgtaagaatttccgttttttcgctcgtgtcggttctgcgcctttgataaccactcgatacgttgggtctttatctattaatccatcgtgaaacaaatctttaatgcacgctttcacatgatgatgaaagtcttttacggtctgtttctcatgtgtttcagcataaacattaataattcgttgatattctcgtctgtcaaaatctgagataaaaagttttgggcataaatctcgaagttgttttgctgcattatagtatttagctagtgttatttttgcaattgctcccactttatacacttcgacccactcttcaaagtagtcacaaaatagtatttctttttgcttcttagccatgttctccctcctaaaaaagtttcaattgtgatgcttcttcgtcctctatttctaactcatttaaatatctatcagctactgaaagagggctttctatatgttcgataactggttctagccatttatgaatattaaattccttctctactgtttcactgtggatcatgatgttgaaagaactaaaatttaataaatcgtctttatcgttttgaatgaaatacacttgtttcgcttctcttgttagcgcatcaccgtgaataactgttgcgttcattcctctaattaataaattgaaaagaaggaaaggtaacgcacgatctgataattcttcacattgatacaaatacatagatggtagataatcaaacggcgaatattttaggcaatcttcataccatttgcaaatcgttaaactacccgtaccagcggcaacatctagtcttgttcctccctgactgtctgttaatcctcttactaattgcgatgcaacactacttaattcagttggtgtaaaatcttgtgcatatttctttttattcgcatgctcttcttcaaaatagacgtgaaaccaatctttttctaaatgcgtatcatgttgtaaaaactgtttaaatatctcttctcgtttttctctatcaaacaaaattttcattagcgcatcagatgcttgatatgattcttttattccgattaaattattaattgtttccgttgttaatgtcacgcttgcacctccttcataactcataaattcttaatctcttctagcttttcaatcagttgttcatgtgttaaatttctaagaacatcgtttgttacagatgtgctgtattccagctcccaatttttgtcatttataaattgaataaccgcaagttctacgccaggacccatatattccttgattacactagcgccatagccatttttaaatcgataaatagtttgttcactttcaaactgattctttttcttatgttctaaaatgtattctttatactcatttgcgattgttttcacgcctgcacctcgctcctagccgctaatttcgctttaatttcagcgactttcttttctaagtcttcgcttgattctgttgttgaagtttcttgtttcgtttgtttctgagccttgtcgaaccaatctggcaatatttcttgtttaactggtttgttgtatttgttgtaagtgggcttgttatatttttgctctaactctatctgtcgttgtttttccgctgcatcaacatcagctattgttttaaatcctctgctttcccagtttttaagaatcttattaacgtaagcgtaatttcgtttgttagctccttgctctgatgtaacttccaaagccttcatgacaatttctcgattacctgcaaaatcatctacccaagcaagcagtttttctagttcaactggaagcatcattccgaatccgttttgttcccaaaaatccttgaaatttaaatcgctgttgttgttaatatctttctttaattctttaattcttaagttctttaattcttgtttatgtccctttcgttgtaccatttgatgttctttcgttgtatcttccgttgtgtcaatcgttgtccctttcgttgttcttatttcctcagaaatgccttgaaagtcgttgtaattactgatttcgtacgttgtccctttttgtctacttttagttatcgttatcatgtcattttttttcaatagttctaagaactttcgaacctgttttctgtccgcattccatcgatttgaaagccataattcagatgtatgtttttgtcctctttttatcgttattaactctccgtttatcaaaatatccctatcttggtgattggctaaaaggagcaaatccaaccaccattttaaatatttttcattctcccaaatccaatgttcttgtagagaacgataaatttttatccaaccactagacatgctccttttctcctttcatttagatcattgacccttgaacctccgaaccagcttctaacgtgtcagacggagttatgggcgcatctatgatatctggtattgattcatcttctgtaacgtcttttcgttctctaggctctgcttcgtcctctgtaaccgctgtttgcatatcaatggataaaatcccccacttgcttaacatgtttctaagaacagtttttttagccattgcatcgtagtcttttttccatccaaaatccgatttactaaatttctgtttatgcgcttctatttctttacgagtccaatagaccgttttttcaaagccattaattaactggaaatagccacagtagccaacaactttttcacttgtattgttgtctaaatctagttcgatttcttcagtaagtcggttccatttcagtagctcaccttcgcgcacttcgataacattaatgcttttatattgtcctgtgcgtagtgctaactggatgtatcctttataaccaagctgaaactgtgctctgcctttgtaaggaacaatccacgcataacctaaatttttgtcgataggtaaatctagtgttgcagcaaccatggcggaagtaacaactgtcatcgggtcagttttttgtaaatagtcgtcgccattataaagatttaaaagggaagttaaaaattgaggcgcttttttatctagtaccttttcgaatttcttgcgcattgtcggtgcttctagcaaaccttttaagtctaatgattgtgcgcttgctacttgccctccattttgtttatttgctaattgattttttaattcatcgttagttgccattatttattctccttcactgcaaattttctataactagtttctttacgtaattttttgtaaatgtctggatgttcttcttttaaacgtttagtgtctactcttgaagtaataacaggcttccaagtaatcgtaaattcgtctgcgatggctgtttcagcttcttttaaatcattcttgatattattatcaatttctttctttcgtgtctctaaaagctttatatcgcgttctaaatttgctctttcagccaaaaattcgttgtatttttttgataaaataacttgtttagcttctgacttagcaaaacgatcttttaaatatttttctgcggcacttgaaccgtctagcgccggcgctacatgtccttttacgttcgtttcccaaaaatctaactcaaaagcaattatttgattgattaactcgtcatcgcgttcaatttctttccaaataaatttatttcctccaattagaacagctacataggctttgcttttacctgtgaccgctaaatagtgttgtatttgcactagataagtcgctggtacttcgtcagcttcccattcctttgctaagtatgctgatgctgttttacattccaaaatagcgtcttcaccaaccacaaacctatcaacgtttgccaacataaaatcatgctctggatgttgatacatcatgttgctacgtcttactttcttgccagttcgcttttcgaattcttttgcgacaacttcttccatttgagttccccagtatgctgcttctcctgccatttcaccgggcggaacctggtcggtcttgtctaaccacaactcgaaagctgttttgtattgatttaaacccatgatgattcccgcatcgcttccgccgatacctaagcgccgagtcagcaaccattgtgttctatccatgtctttcacgcttgctaaaatgttcattgtcttttcttttgcaatagccatatatgctacctccattgattaatatgtgaatttgaggtataattttcttaaggtaatatctcaaatccttaaagcgcgcactgctatgcgtgcttttttaatgtctaaaaccatcgtcccaaagatcatcaacaaccatcggattctcaaccacgtttatcacttcctctcagccaaaaacctgcgattacagacataaacgacacgaaaatcattaccataaatacatccatcagcgcgtgacctcctcatagccttttaacttcaactcttcgatatagtccgtcatgttgtcgcaacctgtttcgtttaacgggattttctgctgaaatgccggattagcaatcatttttgttctgctatttgtatgaatttcgctatcaccgaagtttgtagtctttctgaaaactctttctgtcattgttgtagccctcctttatttttctccaccttgcgctacccacgcttcaagttctcttttgctaaaaatccatgtcttgccgtttatttttttgccgggtaatcccgcatttctagcccaagattgaatagtcctctttttcattcctaacatttccgccgcttcctcagctgtcaaaatatccttttccattgtttccattgtttctcactccttcaccaaaccatttttttgatagaatttatctcgactttctaaaatttgttgtaaattaatgttgaatgccttcgctatacttgtgttaagcgttaatgctgttgcgattacatctgttatttctgaaattgcttgttttgcggcttctcgttgtagcatgtcgccttttcttaaattgaatgtcatcgtttctaatccgctttttaacgcatttactgcttctgttacttctagttcaaagcgacaagttaaagccgcatggtgactgtctaagccgtcgaaaagtggaggtatcattccgtttgaaaattcatgtgcgaataaatatgtgctttctggttcgttgtagctatcaattaactgttctgcttgttcaagtgaaactgtacgctttcctttcaactggttgcttattagtgctggtgttacataactatcaatcgctagctctttttgcgtgcgagtttctgctaaaacttgcatcgcggttggcgctgatgttgatttttgaaacataatatctcaatcctttttgtttattttttaaccactaattaacaacttatcgttatatactattgttagtcgctccccgtgactaagttgtctgcgagcgccgttgtggtagcggcgcttaaattgtttttaatgattgttctaagaacttatttacaaagtaaagttgtcctttgcctgtaacttttgctgtaattgctgtttgcgctccgcttgatcttataatcgctgtttctttaatcttaaacagtcccagttccatacttttttgcgtagggcgattgtaatccgtgccttttctcgaaatgagatatcctctttggcgcatccattcaaatagtcttttctccccaatatcgatgccgttttgttggattagcttagctaaatctcttattaaaatggttcctcttgcatcgcttacagcttcagcaaacatcactttcggcttttgtatttctaacctttgttccgcttctatccgcttcgttttttcttcttttaaatttgttgctagtttgattagaaaatcagggtcagtgattgctttttctattgtgtcatttgtcatgtaagcaccatgcttacggacagatggcaatacttccgaagtaacccagtcttgaaatctttcagcagattctagttttgatttaaaaatcaactgatatagacccgcttcatttatagcggttaaattttggcttcctccaagggagtcgtgtttcacgacccccttgtttttaaggaaaacatggcgttttaatgcatcgcggctatttgaatatcccaatacttttgccacgtctttgccgataaaatgaggctcgttttcaataaatactgttcttacttcatttccttcaaagttgaagatttgtaaatttgacattttgttctcctttctgttcgccctttcacagtgctatagtttttgtgaagggaggtggaatttgtgaaaaatcgcatggatataatgttcaaaggtatctctgatgaccagcccattgctctaatgggcgttataagcattacatcttttccagataacaaaagttttgatttaaatgatttttatttagaagccgataaaacttacaaaatcatttataagggtgcaagcgagttagaaaacgatttatcgaaagtttttctaatgaactcaaatgatgtcctttacattgagttcactatttaataactgttttcaatgattccgctaaagccgacaccatggcggaatctcccttattgagggcttctttaaaactcgattcaaaattttccaaaattactaatttacattcaagccgtttttgtttaattgcttccatcatttcaaagtccttcattttttaacctcctattctttttggaaaagcttcacttcaccttaatttctaacgagtttatagtgctagccaagtcttccaccaaagatttggcttcacttaatctcttttctaacaaagtggcgttttctatggaatcctctactccattcagctctactttcatttcgataatttttagctcttgatctttttcaagtaaatctaaaatgttttttatagtgttgtacttaacgaataatctattctctttttcattaccattttctaaaattgtttctaatttaataattgcttgtttgatgttattcatttttcttcctcctctatttgttttaaaaaagcctctacttctaaaccatccacatctattctttctggatagcattcaataattaactttggtcgtttaccgcctagtatttctaaatgaacacctgttacaaatcgtcctactttccagtcaccaagttgaatggcattatatgcagacccatcttctctttgactagttttgattgacaaagttaactcttcgttactcatgttctagcctcctattttcttttgcccaaatcgccgttagttttttccgataatctattaactaatgaattaatttctgaataaagttccggcaaaatacttaaatcgctaaaatcttcgccagttatacttaattcaatggtgagtactgactcttttctatttctcttagttaggaaagagtttgtaaatgcaatttttttcattttctagcctcctatttttggttactctccaatctgctataattagtttgattggaggtgatattatgattaaagtttcgctaatcgaagaagggaaagttcttcaaaatatggaactctattatttacctagaaaaggtgacgtcatttcaagtaccaatataaaagcaccgcattacctagttaatgtagtagcacatgtagatggtcacgaactggtaaatttacatgtccaggaattcgcgaatcaagttgtcgcaggcaatgagattaacggtttccgaaataatcgatgaatctattgttttaatccaatatgcatttttaattgtttcgctatctaagtacactgcttgtttggtaagcacaataactttttgtccaccttgataagttacataacccttcctaacaagcagtgtgccttctgttatttcctcaattcttccaactactcgtcccgcaatttctaaaatgtctcctactttcattttctaacctcctgcacttattagacacaatacgtgtctttattattaaaaaaaatatcttcaatcggaacattgtagtaattagcaattttgttagctaaatttagagagggggttctatctcccctttcaattgcaccaagcatttgaggagtcacgcccaaatcttttgatacatcttgtctagagcgcttgcctctcaatttaacaagcttttctctcaaattgttcacctcctaaaaagaaacacttcgtttctcgataaacaaactatatcagaaacataacgtttctgtcaagcgtttttagaaactttttgtttctacattgaaaatttaatggactggaaactaattgtttcttataatatacatatagaaagcgtaggtgttagaaatgtttagtaaaagattatctgagttgcgaaagaaaaaaggtttttcacaatacaaattagccgacgaacttggattttctagaggtcaagtagctaattatgaacaaggaacaagagagcctgactatcaaacattactgaaaatagctgaattttttaatgtatctactgattatttattaggaagagacgataataatctcgctgacacaatcgcagctcacattgattcaaacgcatcagaagaagatatgaaagagatactcgcttatatagaagaaaaaagaaaagaacatgctaatgaagaggaaatagacatcacagatattgcagcgaaaaaagatgctgacgtggcaaagttcgtagaggaaaatccagattttaaagcagttgctgcacgtgtcatggacgatgaggaggctgttaaagcggtcaaaacatttattgaatattacgagcaacaaaaaaagaagtaatgtgtaatttatttactattaaacctcttgacttgtaacttaattacttgttattgaagttaattattaacattgtgtgaaaacgtgatatattccacgaaaattatgtataatataggtgcaacgttgcaataaaaaacaacggggtataaatacatgaaaaaactagatgaactgaacatgcaacatgatgtagtgatgctagaacacgaatttacttcttgttcattcactttaaaaaaggaagttttcatagttattgatagtagattaagtcaaagcgaaaagttagaagatgtcgcaaggcttttgaataaaatataactatgtaaccagttcgcggccgcagattggtacatacaaaagggagataacgggatgatagctttatttgtactagctggtttgtttatttttaccggtattattattttagctgtatcacaattacctggcatggcattaattgaatttgcatttgcagctcttttcatctggcttgctttaagaataaagagaaaaaaagccacccatgaaaaattcgatgtaaaagaaattccgagtaactcgcctcaaattaagttaaattttaatttagcacaacaggatttaaatttcgctataaagaaagcggttggaacaacttataacatggttcaactaattccatcaaatcagataatttttttatccaaagatggtcttgtgacaaatgatgagttttactttgttgattataagtggctaggtgcgacgtacaacactcacactaaaactaatagcaaagctgggaaaactattgctggaggagtagttgggggaatagtcggcggaggcgcaggaacagtagtaggtgcattggcaggaagtagcggtaaaacaaacagcacttctacgcaaattgaaaataaatcaaaagcaattttttacttttacaataaaacaaaagatattgatttagtaacagaattaaacattacatcaaaagatatagttaaactcgaaagatttgtcaaatatgtaaaataaagagagccaataggcttttctttttatcgaaaaaagaacatatgtgcgaaaggagggcttatttatggtaaaaaaagtaaaaggtaggcgttatgagggttctattgaacaacgtagcaaaaattcatggcgtatgcgcgtgactgtaggctatgactacaaaggtacgccgattcgagctgacagaacgacgcgaacaaaaaatgagagggagcgagaaagagagttaagaaatttcatcacagaattagagcaaaatggatatacagctcctgcaagaatgacatttaaagcatttgttgagaatgagtatatgccgaaacatgcacaaaataacctagaagttaaaacctggacagaatactacaaatctatagtagcaagagcttacccagcctttggcggcgttcaaatggataaaataactacacttcatatagttaacttagtcgcaaaattacaaaagcccggcgcaagattagatgttaaacctacagattcagacgaaaagaaaaataagccgctttcgccgcgatctatcagaaatatttattttgcgataaattcagtatttgaaactgcggttgagtggaaagtaatcccaattaaccccgcagagggtgtaaggcttccaaaaacaactaaaagaccgcctactatttatactcctgctgaaattgaattgttaaatgcagctctagtgaaagagccacttagattgcaagtaatgatttatatagcgctgatttcaggttgtagagaagctgaattagcagcattagaagtaaaacacgtgaacttaatagaagatgagctaacattcgaacaaacgctagttgcaaaagcaggagaaggtttacttcttaaagaatcaactaagaatgatgtagctgggatagtttctatacccgcttggttaactaatttaatagaaacatatataagcaatgaagttttagacctaaaaactgaagggaaatgggccaatcacaaatttttattcgccgacatggaaggcaaaccgattaggcctgattcgatttatcagcgttggaaacgatttttagaaagacacaacttgccggtgattcgttttcatgatttgcgtcacacatctgctacacttttattgaacaaaggtagagatataaaaattatccaagagcggcttagacataaatctagtgtgaccacttcaaacatttatgcacatgttttgaaagatacgcacaaagatgcagctagcgattttgagaaccctttttaagctttctgccccacctctgccccacttaataaaaaaaggcaattttaaactaaaatttcacaaacaaaaaaccgcttaaacgctttgtttaggcggtttttatatatgggttgtgagggtttcgaacccccgacccgctgattaagagtcagctgctctaccaactgagctaacaaccctcgtcgtattccgacaaaaaacattatatcataatttggtgtaaaaacacagccacagcaccttgccatgactgtatttcttaacttagtaaacggaatgtaatggttgttttcctgctaaaactgcttcaacgttcgaaatggccattcgacccatttctgtgcgtgtttctacggtcgcattaccgatatgtggtgttaaaacgacattttctagtttgcctagttcagctccaattttaggttcaaattcaaatacatcaagcgcagcaccagcaataacacctttttcgagcgcattaattaatgcagattcttctacaacaggaccgcgagccgcattgattaaaaaagcactcgacttcattgtatttagtgtagtttcattgagtaaatgtttcaagctcggactatatgctgcgtgaatcgtcacaacatcgctgcgctttaatagttcatcctgacttacaaactccgcatcccactgtttcgctgcttctttcgggtggtgcccagaataaatgattttcattccaaaagcagccgcgcgttttgcaacagcctgaccgattctccctaaacctataattcctagagtcttaccgcttaattccgtacctaaaaagaatgtcggcgcccaccctttaaattgctcaggtgtttcacgacataaacggtcacctgctgaaattcttcgcgccacatctaaaatcaatccgagagttaattccgctgtcgcttccgtggatacatccggtgtgttagttaccgcgatgcccagctcttgcgctttttttacatcaatattgtcaaaaccagcgccaatattcgctacgattttaagatttttagcagattccagtacttttgctgtaattggtgaagaaagtgggcaaatgattgcttccacatccgtaacgttttttattagctcagactccgtaatattttctttgcctttgtacgtttttacatcccatttatctagagcttccatcgtttctggtagtaattttcctgctacaaatacgcttgctgtcatctctttcactcctcaagtgccatttttacccttatttcattgtaatccgttttttatgaaaggtaaacgattttacgcaccttttcctggcaaaatacgatataatggaagcggaagcgaggtttgaaatcatgaaaaaaattactgcgccgcggattcctgatggggatttgacggtttatccgaatgatacatattttattgaagatattggagaagttagtgagcaaatctttagaaaaacgacgctaactggggaaattttcgagcattttcatttagaaacaattatttttgatggttgtgtttttgattcggtttctcttgtaagtgcgaatttaactgatgttgtatttaaaaattgcgatttgtcgaatttagatttaatgggcgcaattattcaccgggtacgttttgaaaattgtaaattaattggtgtgaatttcagtgatgctacgcttagaaattgcgtttttgttgattgttatgcggattatgttgcctttcgctatgctaacttgaaatgggtggcatttgaagcgggtgcgtatacgaatagcgattttagcggggctcaactggtcgacacctatttggaacgacttgacttgaataaagcacagtttttgaattgtgcgctaaatgggattgatcttagttcttgcatttttgagtcgattactgcgatgccgcaagatttgaagggtgtgagcattgatttttctcatgctcctgccttgatgccgttgtttggaatacgggttaaataattgaaaaaagatggttccgcgttactttggaaccatcttttcatgtttaattagccattcttttcgggcaagaccgccgccgtaacctcctaatgctccgttagtattgattacacgatggcacgggacgatgatggataattggttagccccatttgctcttgccacagctcgactcgctgttggtcgccctagtttttctgccaaccttttgtacgaaatcgtttcacctaccggaattcgtcgcagttcattccagacactttgttgaaattcagagccaatataacgaattggtgtctcaaaatcaactagctcgccatcgaaatatctccctaattcttcttccatttgcttaattaccgctgttttttcaggggaaattgctgctttcaatcgcattcgcagcttttttatttcagtttctaatcctttccgatcaacaaattctagcagaagtaatttatcatcatcggaaattgccaacattgatcctagcttagtttcaatccaagcagagtacagaatcgttatatcttttgatttatgaggaacatctcccatcgtttttgaaaaagcatctcggaacccattaccagactcataaccactatcaagttgcgcattaataatcgaatccccgctccgaatatgcttaaaagcaagtccaagccgccgcgaacgcgcgtactcaataaaagtcatcccaaactgcttcttaaactggcgccgcgccgtatttgcgctaatggataattcatcaaaatctttatcagtccattttttctccggatttttctcaattgcatcgacaagtaacttcacagctggagacaatttcgtcggattggagagcggttcacaacgcttgcaaggccggtaagatgcaagtaacgcctccttggctgtactgaaaaactcacaattttcttttaaaggtttcttcgccggacacgttggacgacaaagtattcccgtcgttttcactccgacaaaaaatacgccttcataattcgaatttttctccactaacatatcataatatttatcaatatcccgctgatttgttatcataaggctcttcctccttcgaaaatccgctcaacttcccgctgaatcgctaaattagcctgaaaaaaactaaacggtccataactgattcttttcacaccgattttttgtaattcctcgactgagagcatcccatccatcatcataatattgactggaagtggtgatttctcaacaaatgcgcgaattaattttggtgataacagacccgggataaaaatagcatccgccccagcctccttgtatgcctttgccctgttaatcgcttctcccaccaagtctaccgtctcatctcgcccttggaaaaagacatctgtacgcgcattgatgaaaatttccctgctcattttcgccgccgtttctttaattgtcttgattttatcacattgcgtctcagtactgcataaccccggatttgcagcaccaataagctgatcttccacgttcacgccacaaacatcaatcgccagcaaccgctccacattctgagccagttcctccaaatttcttgcatatccagtctctatatccaccgtcagcggcaaactcacattctcggcaatgcgcgaaataactgaaaacatctcgtcaaaagttaaatgctccccgtccactacgccgagtgactctgcaattgcataactgcttgtcgctattactgatgctcctccttgttgaattgctctggcggaagcgacgtcccagcagttgtagagggttagtggggcggggagttcgtgtagggattttagttttttaaagttttttgtcattggtttcaactccatttgttaggatggagttagtatagcaggtgtgggggttgggggtgcgaggaaaattaacatggatgttttttggtagatgcatgtagaaatgtaaactcttgcatatgctaagtagcctaagattctctcccccatcttagactacttgttcccgtatgtagttggtttttattctctatttgaaatttgttatagaaatttgtcacttgcttttttgttggtttttaatgctactttagtttctttttctctatgattattaataaaaagcagcactatctacaaccattcttaccaatcccagttttccgtaaaagtttatttggatgacaacaatttaataaatctattttcaatatcacttgtgagtttagcaattacaatcctgtttactcttttgtactctaaattttcacttctcccataatggacaggggtattctggcggttccccgtcttttactcttcgacgatttgacaagactgtaagttgcataatatttaaaaattggttaaatgcttggaaaatatcctcaaattcatatttccccattacactagctctatcagctgtcatgtaaacttcaaatttagcttcattcttttcaattctaacttgatattcttgtcgattatttttctcaccttcgaatatagcgtatcttaattcttgataacccagtaaataaatatcttcttctaaaatttttttatattccattaaatcataactcattattttatctcctttaaaagattcaatttttcataccaatcaactactgttcctagttgaatttgagttcctccaccagctccaaatacttgtactacttctccttgttgaacgctagctaagtctttgaaataaaattctatttctcatattcgcatgagtcctcgcattttcttcatggttatcgtccaagccttattctaagtttccattaatcaatagaagcaatcatccatttaatataagtgctcattaagttaatttaaaggtatattttttcgttccttctcaatctttacttcatttttcggtacccatttttcataataatatttatcagttctttcaaaatttaattctttagctatttctgtatttatagtaccaattctaaaaaaatctttggtttcagtaatagattcaaattccttttctttatacacgactatatctgatatttcatacagctcttttatacaagaaaagtcaacttcacatatatataagtctggcaatttttctttatttaaatagttatctgggtattctttctttacaaatcccttttgtatatcttgttcattactactaacaagtcttactgtattatcaccaattttactaactttataaataacttctttgtatttagcaaattttgtactcatagttagcaatcccctttctaaagctgctcaagtagttcctaaagaacacagagtagttgacttttccctactatttatacaaaattgtcaaactgttgataaataggtagtagcatataacgaactccttgcatgcattaccttatattataaaaaatatctatactacttatattacttcttggatcatattcagaaattatttttccccaattataacttacattattttgaataccgttctcacttaatattttatcgtgtattgttttcctatctatttcattagattcagaaatgttttgatcacaattaataagagaaacactatataattgcttttctttaaaaaataaatttacaaagtaatgatacgtatcaattttttgtattttctccagataaattattttaatcccgtcttgtccatcataatactttgtgttcttaaattcatcaaattgatattcaggatgaacaatcaattcatcatttatcttcaattctccatttacagtatttaacatttatttagctcctcaatcaattaattttatctcatcaataggtattaaaatgcctttttctattaattcatttacatttggaacaaaaacttgaagtgctccaccctcaccaaattgtggattagctttcgtaaatccagatgctgcatcaacttcactattcactttataccctgtcatacttttccgatagccataaataggatgtttttcgacttgtaatccttcaaaaattttagtcgcactaatatcagcattttctatgacttccttagtggtaaagtattctgatccatttggctctcctctgtaaatgacatcccccactttcaatacaatgtcctcatagtcatccactcctggatatttaccgcccccttgccaactccttgcaattgacgatgggcttttcagttcattagttttaccgattttttctattgtaccaccctctccgccgcccttcacattcaaattatccatgttttgcataatatctttcagctttttcttcgcggctatcgcggcggctccggtggcgctttgttccgggatactgcctcctcccgcaaaggcgagttgctctctcgatggaagtgtgaaggtttctttggttttgttttggatagttttgcccatcgtgccgatatcgtcgaggtctttggtgagtttcttttggacggcttcgctgacttttttcgcattggccaaccggagatccatcgcttgtttccctgcttgaatcccattgtcgatggttcctttgccgacgttcttgctacctgctaaaacattatcgcctacgcggacaagtttcgagccggcactggcagctttcgctcctgtgctcaatgctttcacacctggaacgatatctagcagtgctaaaccgccacggagcgctcgttcttccgcacttagttctcggccagatacccagtccttcccgctgattgccgaaccagcttctaaactcccgtatcctaccgctaaggcaaggccggcgggtgggcagaaaatactgacacccacaatcaccacggtcgccacaatgctgacccaaaactctttctcttgttgttcatctttaatcgatttatattcaaatgcccgactatgtaacatccccatttgaaagtctttttcgctcacttcttgatttggattcgctcgttgccagtccctatattgtagttgcatttggtttgcgtagaagttatcgtcgttcatcaaatcttcgatcgtcgcaccttctttgatggactcgatgacttgcgaaccgccagatgtagttgtataggtttgtttcgacttcgcaccaatccggttggtggtagaatacgtcgaaatactcaaatcttgcatgctgtccacaaacgcatccaacttctcataaaacggttggtttaccagggtttccatcttttcccctgcatgacaactaaacttatacaataccatcaaatcgtcttcgatggcgctgtacttcccacgatagttggtgtgttgaaaggaaatcgcgcggtcagagtccagttcttggataccttcttccatatttttcgatactttttctaaattattaaataagccgcccagccagttcgctgcggcaaatggggcgagggcacttttggcttatcggtagttgacttctttcattcatctggtatccgatttcctaggttggaatagcggtttttgtctgagttcttctggatctcacattaatcaatatggttaacatcccatttaactttttgaatcgattttctatatacctaatctattgaattacagtcactgcgaccaaataaatacagcttttttaattcttctacaaacttaaaatcttcctctagctcaagtttttcaattatttcataaaaatgttttaaatctaaactatagttacataaaactttagccgcgatgtttaattttcttgatttagtaatatatattacggatttatctttcccgtaatacaaaacattgtacctgtcattattttctttttctaacacgattctaccttttctcctatcaaaaaaagagtagtatcgctctccaaaaacaagcataaaaattgttttaatttcttcaagtgactgcgccttatcaatctcatctttaatattcgaattatagtctttaaactccagtttattctttccataaatgtatactgctattatcgccctatcctcttctgaaaacgaagccaccgtatattcttttcctcttaccatattcattaagtcaaagtaaccactccgcttgttcaatattactttaacaaaattctctggatagtgatttattcctcgaacagcaatagaaattaggctatttgcatcatttataatagaaaactctgtttcaattttattgtatatgctggaaatgttcatcatctttactcctttatggatttagaagaaactccccatatcacaaggtttatattcaaaaaaacacaagcggaaaagagaatataacctaaggacattcacctgtgcttaggtcatttctatcaatacagttctctacattctcttaagatattcttttttccactcttaattatcccataacggacaggagtattctggtggttccccgtctttcactcttcgacgattcgataaaatcctactttgcataatatttaaaaatttatccatagcatcaaaaacattattaaactcatgtttccccattacactagctctatcagctgtcatataaacttcaaatttagcttcattcttctcaattctaacttgatattcttgtcgattatttttctcaccttcgaatatagcgtatcttaattcttgataaccccgtaaataaatatcttcttctaaaatttttttatattcttttaaattataatccatcaattttgtctccttgttatttattggtaacttgattagcgagcttgctcttactattcacgactttacgttccaataccaaaccgaagataaagtatctttttattttataaaattactcttcttctgtatttttctctggccataaacctgtttcagcatatttcattacttcataggcaccgtctcatgacttgaacgcttttcccatcagcgcttttgtaatgggaaagaatactggttcacaagttactcctttagggaaagttatttgaaactctccatttctttctattactgcgaatccatttcctctataaattttttccattaaaatttatccttccatcattttaatacatttttagcaatatattcatcctcttaattgtatctacaacagcttcaggtattccaccacttgtggatcctcctggttcccaaaaactttgccaagcacctgattcattaccactaggcactctcatattggtggtttttttatatctagtaacacaggattttctcctaaactcataggttcaagtcctaataattcttccaaaattctaggatttccgtcagcaacagatatagctttatctgtatactgctcattagactcacctttacttaaggtctaatttttaagattcaacaaattacgtaaaatagccttataatccacttgattctgatctaactctatggcatattctttaatcatttgtttaaaatacatatatttccaggtgaaattagctagaactttagctcccattgtcaaactagagttatcattacttattgtatgaaaaatcatatctatatcacaataacccactacataagtatttttttcgttaataaggcaaatggcatctttcttataattttctatttcgaacaagttagaatccagaaatcttgacagacagttctttgcctctatctcgttggaaatagtgttcttaagttccggtctaggacaaatcgttttaaatcggctcattttaatcattattccaaaataaaagatggctacttctttatcatgtaatgtcataatttttgttttagtacctctagacaatttgaatagctcgtattttaattcattgcaggctaaaacaaagataatatcttgatttacaataccatttgctcgttctcttacttctattttttttctatctttatcagaatcaacgatgtatctatcttcacctaaaaaatctactagtttttttatcatatttaaaatacctcctaattaactaattctaaatattcttcatctattaattgctctacagataatacagtaccatcctcagttatcccataaagttgtgttgctcctcctttttgatcaaaccaaggagctgtttctccttctataattttgaatggtttttctactctatatttatagtaaatagaggtttcactatgtggagctagagcgcgttcctcaaacgaaaagcctgactttgctaaaaattccccactaggctctccatatctatcaaaaaattctcccacattcgcaagtctttcatgcgtttctcctataaaaccgttatttggaggccaattaatcgctccagtttcctgattataatacttcggattcttatatacttcttcatattttttaaacaactctttacttggaggataatcccactttttcatattatcaggaatttcaatatcatctagatattttccactattttctgcaccctcaattataccagctttaccgccgcccttcacattcaaattatccatgttttgcataatatctttcagctttttcttcgcagctatggaggcggctccagcggcactttgttccgggatactgcctcctcccgcaaaggcgatttgctcacgcggtggaagcgtgaaggtttctttggttttgttttggatggtcttggccatcgtgctaatatcgtcgaggtctttggtgagtttcttttggacggcttcgctgacttttttcgcattggccaaccggagatccatcgcttgtttccctgcttgaatgccattgtcgatggttcctttgccgacgttcttgctacctactaaaatattatcgcctacgcggacaagtttcgagccggcactggcagctttcgctcctgtgctcaatgctttcacacctggaacgatatctagcagcgctaaaccgccacggagcgcccgttcttccgtacttagttctcggccagatacccagtccttcccacttatcgccgaaccagcttctaaactcccgtatcctacggctaaggcaaggccggcaggtgggcagaaaatactgacacccacaatcaccacggttgccacaatgttgacccaaaactctttctcttgttgttcatctttaatcgatttatattcaaatacccggctatgtaacatccccatttgaaagtctttcttactcacatcttgatttggattcgctcgttgccagtccctatattgtagttgcatttggtttgcgtagaagttgtctccgtttagtaagtcttcgatcgtcgcattgtctttcacggattcaattacttgtggctgattgccgtaagaagacatgtacgtttgtttcgacttcgcaccaatccggttggtggtagaatacgtcgaaatactcaaatcttgcatgccatccacaaacgcgtccaacttctcataaaacggttggtctaccagggtttccatcttttcccctgcatgacaactaaacttatataacaccatcaaatcgtcttcgatggcgctgtacttcccgcgatagttagtatgttgaaacgaaatcgcgcgatctgagtccaactcttggatatcttcttctgcttcttccatatttttcgatactttttctaaattattgaataaaccgcctacccaattcgctgcggcaaatggggcgagggcacttttggcttcacgccagtcgtcttctcggtagttgacttctttcattcatctggcctccttatacctctaaagctgcgataattttttcggcaatatctctgtctgcatcaaccatggtttggagtatatcaaacacaacagaggacgccatattgtattggtcttgaagttccattacacgttcattcgctttaggtactttatccattgctttttttgctttgcctttggttaaatacttatttgcttttaactgatttattgctggttttatcacaccctcaaattcattggcaatagctagtagctctttggcaatatgagtcatttcatctggattaatatctattgtagaagcggctcctgcaccgcccatcgtttgttgtgccatctatttagcctcctcataaggaaattcaagttcatcaaacaataattttaataaagcatactgacttccatggtaataggtatcgtttacaacatctatcatcattaatttgtcttccatctcaaatgccaagtactgtttgtaatatttagcattgtttttttcttttggttcctcatccacatgaaagaattccatactaataaaatttttctccggatcaaaagcagttgctcgtttacgctcttcattagtcaattcttcttttagaaactcagtctctctttcaccaggttctctacgaatgagcggaaagaaatcttttatcatttctagcgcataaattttattcattcgttcaaatcgatattctctttgaggagttatctcaatcattacaagtagttcattgggtgttttttctggaaaagcaaacatcaactggttcatacgcacatactttttactttgataatattcaattaaggaatcaatcaaaaagccgccgccatccgttagctcgcctgcattatttaatatccctttactcttgagccggtcaaacccttcagcaaaaacatcttctccctttaataaaaaagtaagcttgtcaggaacaccaaataagtgttgcgcatcgattggagaaagtaaaaggtataactcaacaggggaaaatacgtctatcgtttccactgtcatagtcttttcacatccttgaagtatgaagtattctcaaaatcctctacataatcttctaaggaagttaatgctttcttttgctttttatagtttttcttcacatcagcatgatacttttcaattaattccatgaaggtaaggaaagcgtcccgcgatttaccactccaagatgcgccttctacataagaaataactgatttgcattttttatgtgttgattctaagcttttttccactatggcagccgattttttagcttcagcaacttttgcggcatcaattttcacattacccattctttagcctctcctctcgttcttttttctccttctctttctttgcttgctctgctttttcttcttttatggccaatgctttatactctaaatattttctataagctgtatcaatagcacttttcaaactggcacgtttatctttttctttatctatatatttttcaagctgctctaagactttctcatttttttctacaaacggatttgcaggaatacctttgctcggcatatcaggcattccttttttatacgcactcaaatcactttttacttctgccattttttcatcatgttttttgagagcatcttttagatagtcatgcagcttatcgtattcatctcgttttttctcagtaggtgttttccagaaatctgttagacccatcattaacagctcctttcaattattgatttggtgcaataagtttaattttttcatattgaccttgtttaatgtaatacgcttcatacggcgctagcagagcttctttatagatgttgtttatgagactgagaatattttgatctgaaatccgtccaagtaagataccggttttttgttttcgtaattcaccagaaatttcatctcgagctctatatagaattcctgtttggcttccggtaacaaagtagatacctaatttaggtccattttcaattagtcggaccatatttttcctagcttccagagacatctgttccgcagcatagatactatccgttagtagtacatacattggtcgtaattcttcaacatacattttgagtgtgatttctccattcgatgcccgttgaatctccttccaaccatcttctcgagcttcgagtacgctaacaatttgctctgaagcactattcatggcagtttcctcacctgcgtatatatttacgttgtttctgtactgttggaatctgttagacgaattgtcatatagagcaatatccacttccatattctgaccaattagttcagttagcgaaaccatggttctttccaaaacatctgcattatctgttaaaacaagtgtgttgccatctgtttgcacatctaaattgactggtaatacatcttcaaaatctactgctattggcgtttttccttctgaaaatgatttttggacttgtttattttctagatattcaagcatattgataacttcaggtaccattggaattggcgcaggtcgtgatccgttccactcgctagacatcgcttcactttccgcttggattttttcaataatttcaagtgttccatccgcgcaaactggcagtgccgtttggaaaacagttggctcttctaatttaactaatccacggcccggaagttcttcaatggctaaatcggtttttcctacaatacttcttgcttcacctggttcaatcataaataacggtatttgatgttttatacttgctaacatttgtactcgaatagcattttgtctaactgcactcataactaaatgaatccctacactcgctccttcacgagcaatttgagcaattagtttttcaaatacatctttataaggggcttctccaacagaatcaaatgcatctataacgagtaaaattgctggaacttcttccttacttgctttttcatacattgaaatattcgcaacaccatatttactcaatttttgcttacattcttttaattctagtgttaagcgacgaataagttttccaattttaatttcttcatctaccataatcgtgtcagcaacatgcggtaattttttcaaaggtagtagcccatttgttcctaaatctagtaaataaacatgcaatctttcagggttatgctgtcttgctaagtccattgttattgtttgtaagaaagtcgatttaccgtaacctgggctagaaaacacagctaaatgcccatcttttgccaaattaattgttaatggctcttgcgcttgcatttgtggtatgtctaaaaagccaatggtagcttgaagaggttgtttctcaccgctccatagctcttcagtatttacttggtgcaattctggtaagaaaatttgttcctctagcggcggcagccaaggtctcagcaacgcctcaatcccagaagcctccgtatacgcatgaatatgatcaatcaccgcatcaagttcactcggcagtttcgtcaaatcatccttcttatctaatccgctcaaatcctctgtcaaaatatcatactgacccaagtcattaattgcataaatcgtcgtatcaatataatccgtgctttccttatctggcacataatccgcgccactccaagcactctggaacaattcgtaaatttcgttattaccaacttgcaagtatgaacggcctggtagtgtgatttctgctgcgtctggtgttttcaagatttcatttgaatcgctggcgttttgtacttttagggccagtttgaatttggagttggaccagatttggtcatccacgacaccgcttggtttttgggttgctaggattaaatggattccgagtgaacgcccgatacgtgctgtcgaaacgagttctttcatgaattctggttgttctgatttcagctcggcaaactcatctgaaataaggaataaatgcggcattggttcggtcgcttttccttgtttgtatagtttttggtattggttgatgtggttaacatcgtgctcgccaaataatcgttgccttttttgcaattcggctttgatggaagctagtgcacgcatcgattgcgcgccgtccaagtttgtaattgttccaagtaaatgtggcatatttttaaataagttcgccataccgccgcccttatagtcaatcagcaagaacgcgacttcatatgggtggaaattgacgccaagtgaaatgatataagactgaatgatttctgatttaccagaaccagttgttccggctaccaaaccatgcggaccgtgtgctttttcatgtaaattcagttgaacaatatcgtctttcccgcgcaagccaagtggtacagcaagactcttatacgtttcatttttcgcccagcgtccagcaatgtttagctcctcgacacgctccacaccgtacatttcaaggaaagtgacggattctggaatagagtttttcaagttttgtagatggtttagcggcgcaagagcacggctgattacttctttgtcaaaatctgctggcaaatggtcaggcacgaatgctcggtttaccagatcgccttgttccaaaataatgttcccgctcttcgcatcacgaatatccacgaccgtcttcacgtgttctggcaagctctccatcacatcctgcacgaatactaaagaaacacctagttcgcttggatcttcattaaagaattccatcactgtgtggtcgagtactaatttttcatcggtaatcaaaactacataatgtggcgtgaaatataatttttcctgcttactcgcttgttcagtaagcgcttgtttacgttcttttaaaatttgataaagcgagttcagcacttggtcgcgcgaacgttcatggtaaacaaaaccacgcacattcacatcacgcatattcgcatgcggtaaccagcgcatccagtcccaatccgccttctcttcttctgggaaaatggtaataaattgtaaatcataataactatggaaaagggctgtttgcattaccaacatttgaagttgctctaatactaaacggcgcggtccaatgtaacccactggtccgtgcattaaatctgtcgcaactggcacttcattaatagataaatattgtcctttgattttcacagcttcatcaataagttcatctttgtcctgactaaattcttcttgttgaaattcgacagaaaaactacttgcttcggcgccgcgtccaactcggaaagtcaagaaatcatggtggaacattgttttttcataaatacgtgaatccactcgaagcgccattttttccagttcagttacatccggataatggtaagttaaggcgtggcgttgcttctcacttgtttcatgtaattctttcgtttttcgttttaaatacaaatcgtagctctcgattctttgttttgaatcaattttgtattttttgcgtgattttacgtaattaataatcgccatcgttatcgttactgctgacatcgcgatggtcataataatatacagcccgcgaggttggaaaatagaaatcatcacagtaatcgcaaccatgattaacgggggtaaaataatcttaattaagccatctgttggtttggagggcttgctagaaggtttcgccatgctgattttttcttctggagcacggtaaataatccgcggggaacggtgataatctggatagtcttctccgaacgaattgtccgcagcgaataaaggcgctaatttgctcgtcacgcgatttttcacagctagcacactaatatcttcttttccaattgtaatcgtcacaccgtccgtatagagctgatcacccggttctagaacgcagtcttctgttactaaagaaaaattatgataaatttcgccatttaaaacttgtaatttaaacagtttttccttcgcatcgcgcaaaagtaaaaagtctgattttgtgccatcaatcgtaacatcgttctctgttcccgcaccaaaggctacagaaatgttcatgacgacatcatacacttgcgtatccagatcttggcaaagataaaatgctagattgtccactttcacggattggttcacttgaagcgctgttgtaccgacattccacgagttttcatcatatttaacttccattgattcaactagttctggataagtaatttcgtgttcgattgtattaccaattgtcacgactttttcaggggacaaatggtgtttatgacattgttgcccgttactaacaattaataaagcctctctattcatggttcagtctcccttattttgcttctgtatttgttgatgcatctgtttctttcgtttgtgcatttactttttcatcatattcttttaaattttcttctagcgtttttagtctttctactttttcatcgccgctaagttttgtatcactttggacttgttcgatttgtttcgttaagctgtacattgcaagtgttggatcatctaaaagtttcgcaatatctagtgacttaccaaattcaccgcgaccattataaatccaataaagtaaatttttctgatccgatttcaaactgatggtattcataatattttctttctttttatcactcattttttcgccgttaacgtaggaataagcaagttcgtactgcactgattgcggcattttttcaggatccacattctcaagccccgtaattactttgtcgtagtctgttttaagaaaattttcgttcgctgtgagtaaatcgttttgaagtggtactttgatgaatgcaaaatagctcactggaatggcaagtaaaatcgctacaataataaaaccaaccgcaagtccgcgaaaagttccgtattttttctttggaacaattgccatattctttttcacagttttattttctttcacataagcttcttctaaaatatcagcaatatcttgaatcgtttttgcatctaaaatacttttttcaaactgagttcctctagcacccgaaagcgagccattatataaattttcaaaagaaaacttcttggaaaacagcgcaatcgcaaaacactgatattgcttaaagaatatttcttcggtcaattcatatggtggtaaaatattcttaatcccgcggtgaacaatgctcgggactaaatttatatcaaaaatcaaattatcgggatgtaagaaaaaagtatagcgtgtattcagtaattcacttaaatccgcaatattccgcaacgctcgtagcttatcttcgcgttccattttgcgaacttgctcaaagccatatgtatgttgagcaatctcataagaaatcgtataggaatcgctatcgctcgtaatttttgccggaacaaaatgagcagctggtttttctaataattctagttgcgctagttcttttgcatgtgtttttgatttaggaaacgttacactccacgctaaatcctcataagtaaaatcgtaagctgttccgtccatttctgttgtcttattcatcgttttcattctcctttttttctataaaatttctaaaatgtcgccatcagcaatttgaaaattagttaatttatcatcatcgcttagtaaaatagctttattcgtcgtttttattgtacatttggataaatctttatattctattttgagtgtttctgccaaattaataattaatgctttaattggttgatggactgggatgcgtaaatcatacttatccgcaccccaattagtgaaatcaaccgtcacattcatatgtgtatttttagccatttcgttttccccgctttctattcaaatacattacgcgccgccacataaattccgccagctaaagccaaaagtgttccagcaattgctccaccaactgttttttgctttgtctttttagtttcatcttctgtgattgtttccgtaaccgtcgtttcatttgttgcagccttcgtttcatattcttcagcaaataatttttcttttgtctttttaaccgtttcaccagcagttggctcttcttcaaacaacgactctttaatccggtcatattcagctttttctgtcgctttttgtttcgctatcttttcatccatttcatctgtaaaaagtggaataccttgtttatcaagctctgtttcttccatgtcttccagttctttggtcttttcttcatttgtcttttgaagacgatctgttttaatgtccattttcccactattttcaagataactatccgaatccgcagcgaggacactaggagaaaaagcgaaacaaatcaatacaataaatactgcaatattaaatttcatctgaatcctcctctgcatcttctttgttagaacggtgccaaacgaacaggttaagccctgtaaacactaatgtcgcgccaatcaaactgtatacaataataatgtaatcttgttgcatacttaaaattccattcagcaactgttccatatattgtagtggtgaaaatttcctaaaggtcgcaaaaattgattcattatcgatattaagtccaaccgcatctgttaaaaataggtacaaactcaaaacgagtaaaacaatcgacattccaatcatgtttaattggcgtagtacgtacgaaaatgcagtaacaagcgccatcataatcagtaaacaaaccccaatccataggaaaatcccaatttcgcctaaatcaaaaataaagccagaaatagcgccgattactaagccttcaattattccaacacatatcatcaaaaacgtgattggaatatttttaaagacaatggacatttctttttcaaattcatttagttgctggcgtttcttctcttggtgagaaataacataacttgtgaaaatcgccaaaattgtacaaattagaaccatgaagtacggcattgatttatctccagcgacaatagttcccgcattcattttatctactggattacttaagaaactgtagagattttcattttgccgatcgccaatacggctattttccataactttagcgaaatttttctggaaagtttcatcatctttcagtttttctcctaagtcctccgataaagtagaagcttctttaactagggtttcaccgctttgctgaatattcttcgcttccttatcaatcgcatcaaaagtttcatagacaacttccgccgactttaagttgccttcagacgtcccagcaagtgattcactttccgctaaaagtccggcaaattcagaattcagttgaagcgccattgtagcttcctcacccgttttatctaaaactacatcattttcttttattaaatccttacttgcatttcgccaagattctagattttctaaagttagtgctaaattggtatttaaatttattgcttgttcggttgtctcagtgagcctgttagtgacatcttctgagcgcgaattcgcttcggccattgtatatttataatcatcaatccgttgtttgaatgcattaatttttttcttataatccgctacaaatcggtctgttgtaagatttacaaaattactaataacatcttccttattaaaaatgtagtaatacgaagacgttttcgcagagttttctaaggtaatactataattactaaaatccggtagctgtgctgagtcacttgcgtcaattccgtaatacaaatcaaacaacgcctgcaacttataataatctttcactgtattagtaatagcttttacagaagtttttgtttcgttaagatacgtaggctctgtgactttaataggtacaacttcttttctaactacgagcgaactttctggagtagagggatctaaaccaattggaatcgtaggcatttgaggatattcttgtttttcatattgttgcaaggaagcagtccaattaactgccccaactaaaggcacacttgctccctcttttagtttcgctgtccccgtaaccttaatttcaactggcgtccctagagctggaatggtaagtcttaagccgttttcaccataaggagctacttgaactaatcccgtttgagcatctccatttacaaccccaacaacattttcaaatgaaaagttttcatctaatgttaggagaatttcagaagcatattcacttccttctagggtaattgaactactttctagcgccacgccttctgatttcagcttgtttatagcgtcactttttagcgtatctgttggtagagttttcatttcatttgtgatgctgaaattatcaccaaaagcactgcgatgactgctataatatttttttgaaatggttacaatatttttatataactcctcgtcaagtccgattgaagctaattggtccgtattgtatgtcggtaaagccttgatagttttcacaatcatattgttaaaaccagcattaatatcctcgccagccaaatctttaagaccaatttcattcaatctatcagagtactcgttttcttgtagaatacgtaacaagtcgttatatactgctgtacggaaatcattttcgagcgttccgatgatctcagcatctaacgcttcaatacgagcattcgtttctgcaatgtagctttgtaacgcttgagtctgggtgagtaacgaattgtttccttctataatctggaattctgaagtcatctgatcattggctctttctaaagcgactgtttgcgttctaatatcttccgcagtcaaagttccatcaaatgtctgtaaattttccgcgaatccggctcgaagtggaccattttcctcttgcgtttttgtaaaagcatccatattcttcatatgttccgcattttcttttttagcgagatttaagctttcttcaaaagccttcataatctcttgaaaaccctgaaaactctctttagaggctccggtataatcttctactgttttaaattgttttgtataatttgatagtggattatttatatctttgttgtaaattgcgtcatattttttctcttcttttactaatgtgccaatattgtcttgcgcttcttgtaacgtggttaaaatgctcgcaaaataaacatcaataatacgcgtgttgaaatcttccaatacagacgcagctgttttttctgcttctgcttttaggtcgctatttccaacgtcatttactttgtaactaatggttactttttctggcgcctctgatgtcatagataatgcttttttagaaaaatcactcggaataacaatcatcatattgtatacatctcgttttaagccgctctccgcaacaccgcgacttacaacgtaccattcatgttcttcgtctttttcaacacttttaacaaattgatttccaaactctgcccgttttccttggaatgtgtctccttggtcctcattaacaagcgcgatagtcattttatgcgctttttccgtattatttttatcacccttactagccccttgattcaaggctaaataagtaattcctgccgataaaaaaatcgccaagactaaaaagagtaaaatactccattttacttttttcattcatgtccactcccgctgtgtctttttttatataaatgcctttttagacataagctttctattttagaaaaagccatgcaaaaaactgcatggcttttcgtaaagcatccaacgatatttgtatgtatgctttactgtttaatgatttttagaatccgaagttttgagaaagttgttgatcgtgctcttctactgcgtttgctgtcttctcaagttgatcgttaatttgatccattaagtttgcgaattcagttacttttggttttaattgctcaaattgatcatcaaaacgcataaaagcttgaccttcccattcgctacgtagttgatcttgtagttgacttaaacgacttagaatatcctcaatatctcgaccactttgaccgtaagttttcgcgcgatcacgtagttcgcttggactcatacgaatttgacctgacattcacttcatctcctcttattatctattgtgaataagctatcacaatcaaattatatcatgaattcacaaaagaaattgtgacataaaaacgaacaaaaccacttcatttcaacgttattaggtatttttgtggaatcccatttctataaaaagatgtgtttttcacaaacaaaacttatttttgttaaattttacaacttttaaatacacaaatgatacacagtgattttaaagaaaaagtccttgccatgagcaatatttcctattaataacatcaaaaaaactctccaaggaaaatcctcagagagtttaggttgtagtaatattaagctaaacgccacacgcttttaacaacgtgagtttgcgcgcggtcaggacctacagagaacatagaaacttgcacacctgtaagttgagcaatgcgttccatgtaatgacgacaatttactggtaggtcatctaatgattgcacttcagtaatatcttctgtccaaccaggcagttcttcataaacaggttcacaacgagctaagtctttcaagcttgccgggaattctgtaattgtttttccgtctaacttgtacgctacacagattttaagtgtttcaatccctgtcaaaacgtccagtagcgttaaggataaatctgttagtccgctcacacgacgagcatgacgaacaaccacgctatcaaaccaacctacacgacgcggacgaccagtagttgtaccatattcatggccaacttcacggatagtgtcaccaatagaatcaaataattcagttgggaaaggaccatctccaacacgagttgtatatgcttttgcaacaccaacaacatgattgattttcgatgggccaacaccgctaccaattgttacgccaccagcaatcggattacttgaagttacaaatggatatgttccttgatcaatatcaagcataaccccttgcgctccttcaaataacacacgtttgccatcatctaatgcatcatttaaaacaactgacgtatcacaaacatagtctttaaattgttgaccatattcgtagtactcatctaaaatatcttctaatttaaagccctctagctcataaaaacgctctagtaaacggtttttctcaccaagattatgctctaatttttctttaaaagtttctttatctagtaaatcgataatacgaataccaacacgagctgctttatccatgtatgccggcccgataccttttttcgttgtaccgattttgtttgcgcctttacgttcttcgtcagcttcatcaatccgaatgtgatacggtaaaataatgtgcgcgcggttagaaatacgcaaattagaagtatccacgcctttgtcatgaagatattttaattcctccactaaagcttttggatcaacaaccataccgttaccaataacactaattttttctttgtaaaagatacctgatggaattaagtgcaatttgtacgttacgccatcaaacttaattgtatgacccgcattgttcccaccttgatatctagcaatcgcttctgcattctcggaaagaaaatccgtaatcttcccttttccttcatcgccccactgtgttcctacaacaacaactgaagacatttaaacacctcatttaattggtctttgatagctatgattttttcatagcctcttcattttccactatacattgtaccgtttgccaccaaaatagtcaatggatttacgaacattgatttgtaaggtaattttatcgttcgcttttttaatcattttaatagaaaaccaaagtacatttttagtaatacgatacctttttgcataaaataaaaaccttgcaaactccaaatctaattagaatttcacaaggtttccttattaagccattgcgtcatcataacgcacttctaaattcacaaacttattgtattcttttacaaaggctaatttcacgtcaccgaccggaccattacgttgttttgcaataataatctcaatcgtaccgtcattttcaccttcccgatcatagtaatcttcccggtataaaaaggctacaatatccgcatcttgctcaatcgaacccgattcacgaatatctgacatcattggacgtttatcttgacgttgctctacactacgagacaactgtgaaagggcaattaccggtacttcaagttcccgcgccaaagcttttaacgaccgagaaatctcagaaacctcttgttgcctattttcaccgccacgaccgctccccgcaataagttgcaagtagtcgattacgatcataccaagacctgtttcttgttttaaacgacgacatttggaacgaatctcattcacacgaacacccggcgtatcatcaatataaatcccagaattagaaagtgtacccatcgcgattgtcagcttttgccaatcatcgctcgttaaagcacccgtccgtaaattctgcgcattaatatttccttccgcacaaagcatacgcataacaagttgttccgcacccatttccaaactaaaaatggccacattctcgtctgttttcgttgcaacattttgcgcgatatttaaggcgaatgctgttttaccaacggaaggacgcgcggcaacaataattaaatcattccgctgaaatccagctgtcattttgtccagctcgttaaatccagtcggaataccagtaatatcacctttacgattatgcaaaatttcaatatcatcataagttttaactaggacatctttaatattcttgaatgcaccaacatttttacgctgcgaaacttccaagatactcttttccgcttcgtccataagcatatcgagctcgtcttcgcgcgaataaccatctgttgcaatttgggtagcagttctaattaaacgtctgagaagcgccttgtcctcgataatatgggcatagtattccaagttagccgcagttggtacagcaccggataattccgtcaaataaggcaaaccacccgcatcttctaaattacccttggcagcaagcgcctcatatactgttaaaacatcgacagccttcccgtggtcattcaaatcaagcatcgtttcaaaaatgatttggtgaccagttcgataaaaatcatccggcattaaaatttcagaagcagtaatcagcgcattcggctcaagaaatatcgcgcccagtacagcttgttcggcttcaatattttgtggtggtgttctgtcctggaaattattatccactgtcttacgctcccttaagaaaaattattcttcacttacatgtacatcaagtgttgccgttacttcgtggtgcagcttcacaggcacttttgtatgtcctaaagctcgaattgcttctggtagatccattttgcgtttgtctaccttaataccatgcgttttttcaagtgtttgagcaatttgtttagatgtaatggaaccaaacaatctaccgccttcaccagacttcgcttttaattccactgttaatttttccattttttctttcaaagcttttgcctcagctaattcttcagcagctaatttatcttcttttttcttttgagcggaaagtgtgcttaaagccgcattgctagcttcaaccgcgtaaccatttttaattaaaaaattgtttgcataaccatctgcaacattttttgtttcaccttttttacctttaccttttacgtcttttaagaaaataactttcataattatgtttctcccttccaatacgcatcaatggcgctaattaattgtttttctgcttctgcaattgtaacatctttaagctgtgtggctgcattcgataaatgtccaccaccgcctagtttttccataatgacttgcacattgatttgtccaagcgaccttgcgctaattccgattaatttatctggacgtagcgtgataacgaaggatgcctgcacaccttccattgaaagcatcgtatctgctgcctgagctgcaataaccgtgccgaattcctcgtcttcatgtccagtcgcaattgccataccatcatgataaatttcaagcgactccactaaacgactccgctgtgtaaaagtagttatatcctcttttaaaaattgttgcactaaaattgtatctgctccaagcgatcgtaaataacttgccgcatcaaatgttcttgaaccagttcgaagcgtaaagtttttcgtatcaacaacaattcccgaaagtaatgctgtcgcttcaattttcccaacctgttctaaatcaggctgatactcaaatagctccgtaataagttccgctgtagatgacgcatatggctcaatataaaccagaaccggattaccaacaaattcctctgaacgacggtgatgatcgacaacgaccacattcgtagcagaatcaagcagttccttattaataaccatcgaaggtttgtgcgtatcaactacgacaagcaaactcttctctgtgatattttccagcgcaacttgtggagtcacaatgtttttaatcacatttggatattcttcaatttcattcattagtcgcttcacatcaggactcattttgccaggttcaacgaccacataagcattccgattgttcatttcagcaattcgcattacacctagacttgacccaattacgtccatatccggatagcgatgccccataacaaaaacttggtcactttgcgtaattagttcttgcaaagcttgcgagataacgcgtgcccgaactcgagtccgtttttccatcggattcgttttcccaccataaaatctaacttttccttcaggttgtttgattacgacctgatctccgcctcgccctagagcaaggtccaaacttgactgagccaaatctgccaacttaatcaaatcatcttccttataaccaatcccaatacttaaagtcagcggaatattttgttttgacgtccgctcacgaattcggtccaagatttgaaacttctcttcctccaattgcttcaacatttcttcggtcaaaaaagccataaatcggtctgtcgaaattcgcttcaaataaatacggtgctccctggcccagttagtcaacatcgatgtcactaagttatttagggcactacggcgtctatcatccataccctgcgcccattcatcataattatctaagaaaataaccgcaaatactgatttattcgcttgaaatttcttatttaaatcataatactccgttcggtcatataagtacaaaatccgctcttttcgctttacaatcgtatcaaaacgatgctcacgccaagcaattgacataattcctttttcatcatttccagttattacatccagaaattccggtcccacttcttccaaagattcaccaattagctcagttttatcaaagtatttggacatgaaagggttaacccattcgattttataatgttcatcatacagaagtatccccatcggcatttcaactagcgcttcttcttcactgcgcttaatccgatacgttaaattagaaacatacaattgaacgtcttcatttaggcgatattcaaagtaaaacatcgcaactgtaagaataattccgccaacaactactaacgccgataaccaccacgaaaaaaagaacgtgattacgctcaaaataattgtcgctgcaatcagaccgtataatggatatttaagcattcgtttttgaaaatagcctgacatttcatccagctccccatttttttacataccttttgtctgaatttgagtatctatatcataacataaaattaactaacaattcatcactattattttacctatatttccccatttcatcaaattcaagctgacgttcgtacaaaaaaagcgaccctgaaggccacttttataaactcaaacttttaattagttttgatgatgcataacaattttctccgttagacatcttcaccacgccttttgtcgtatcaagttcgtggatatttttcttattcacaatatacgagcgatggcacctataaaaagattcatccaacattttctcaatgcttttcaacttaccataaaattccacttggcgatttttgccatgtaaaattactttatgaatcgtaggcgctgtttcgaaaaacaaaatatcgtctaaaagttcgtgaataatctttttatcggaaactttaaaggtaaaatacttctgcatatcttggtcgttagagattcgttcttctgcctgcttcatacaagctaaaacacggtcatgcaacatatcaatatcatctttaataatgtaatcaagcgcttccaccttgtacgtgaaagtcatataactcagttccgcatgtgtcgtaatgaaaatgatgaaaccgcgtggatcgaatttcctgatttcttgagctaattcaaagccattcatgtccggttgtcctaaatcaatatcaagaaaatacagtcccataccttgatgtctaggcattcgtgatactaactcaaacggatcacctgttgaaagttccaacttcatatcaaaatgttcaaccattatatagtcttcaatatattttgttaacctttctcgctgcatcctattatcttcacatataaaaaccggtagcataaaatcatccccattcttctacataatttctaattcttgaataacttctctattagtcacttttgtatctaaggcaacgtgcgaatatttcttcataatctcccgcaaactagcaagtcctaaaccacgaccctctccttttgtggaaaaaccttcttcaaatattttataaatcggtggcatatttactggcaagctattcgcaaacacaataataatgctatcacccttcttcacaaacgcgattcgaataactggattttcacaagttagtgccgcttcgacagcattgtccagtaaaatcccgacaactttgcataaatctatgctatccatcgaaatcttatcaatcggttcaactacttctaaaattgcatcaattttcaactcttgggctcgtattaacttaaccgccaataagcctttcagttcaatcacatgaatattttgaagcaaagaaattttatagttgttagattcaattgttttatttataggtacgatattattttcaaagtaatacttcaaacccggcatatcatcgttatcaatatatcctacaagcgttgacaggatattcacataatcatgacgaaaaacgcgcatttctctatgcagggactctaatgtagtaacataatcctgtaactgttctagctgttccttctgattctgtactttaagttcattggttgcagtgttaatcacaaccgtcacaataactattaacaaaatggtatatcctgtaaaaataagcgtattaatttttaaaactgatccatcgaaacctgcgattgaccccgcatatatgttcatatagaacgctaagacagtaagagccacgatagaaaaaataatgtacgcatattttctatgttcaacaaatctagaaatattaactttttcaatcaattttctaagaataaacgaaaataccaacaagttcgccagcattcccgcacagtaaattagtgttggtaacaattcattaaatatttcatcatatttaaagttcaagcccggtactaaaataaaacctactatagaatcactgatagtaagcaaaataatgaccacaagcgtaatagaacctgaaactatcacatttttatttttccaatataaggcacttacaaaaacaatcaacacaaaaatcatcgaccagtattgaactaatgtaaataaagggaaggctagcatagcaattgctatagtaaccaatccctctttaattgaaaaaactttgtttgtcaaaatctggattgctataaaaatacccgttatctgtataattgccatcaaaatactaaacatattaatcctccactgtctaaaatatctatgtttaaatatgtaagtttgccttctttttattttagcatgaattttgatgttatacagttttaaatttatttattttcgtttttttcttgcattttcacaaatggactttttggttcgtatacaaacatgaaacaagctttactcatagaagaatccgcaactttcatggattgttcttctagctttctagaaaggaatttaccaactgatttattcatatttttcatagttccgatacctccttttcaatagtttgtaagtaagtggattaatacttatcacctgaaacaaagatcctaccatgattaatgttttcatctctgcgaatggtattagtaacgcaattcccgttaaaattagcgttcctatcatcgcttttctttttagttttttccggtgttcttcaccgattaaaggcaaactttctgtgtctgccggagcgaataaaaacatgttgagtagtataaatgcaaatgtgcctaaaacaatccaattattagaaggtatattttggaaaataaaaggtgcaagcacaaacattgttaagctaattagtgtacagttcaatgttttggtcgcatgtaatccaaaagaataccgtctgagccataaatatgacagatgcactgtcactgtttgcagtaataaccctgttactaaggcaataccgtatacgattgcaaacttcatgacgttaattaaaattatctccagcccatattttacttttaaataaccttcttcgtcatctttccagcgatcttttgaaatcaaaacatccgccattctttctgacaaaggtacttttgcagtaaaattactcaactaattcacctccactaacattttacaacgaatttagccattataaccaaaaatgtaatgaaatgtccgattcttgtcatgaacgactcaaaaacagcaaaaatgccgattttttggatacatttcagaattttcaaacgtgtaaaaagtacctctgaatagtaacaaaagactatattaacctttaactttagtaatattattcataaaaaaagctacctgcgaaagaataatcacaggtaacttttcgtgtttttagtcatcttgttctgtttgtaagacatctaatgtttttgaatttaacttaatttcgtatttattgttaccttgttttacagttacttcataataagttgtatctaattctctttctattttccaacttgttacatcgcctgcttgctcgctaacggctttgtccattgcttcttttggtgatttaattccatctaagctgattttttcgttttctttttctactccacctgtatcttctttatctaatttatcggtttcgtcagctaattcttcttttgtttctgcattaaatttcatttcgtactcattatcgtttgagataccttctactttataaatatattttcccaagtttttctctaattcaacgctagaaatttctgcatcactatgtttatctttaaatgctttcaccgcgtcttcataactcatatcgaagcttttattttgcaagctatcggatgagcttttatcgttgttacttttgctactagtagtttctttactgctattacttgaagaagtatccttatcatcattaaaactacacgcagatagtgctcctactaataatactgccacccctactgttgctaattttttatacatttttgttgccccctgtgtatttttttacttctatttaagaataacatgaatgtaagatgctaaacgtccaacttaagccctaagtttcctccgcataaagtctccatttaacaaaaaacagcctagaaataaattctagactgttaatagttaacttatttttcttcagcaacaaatggtagtaatgccatttggcgagagcgtttgatagcaacagtaagtttacgttgatatttagcgcttgttccagttacacgacgaggtaaaattttaccacgttcggaaacgaattttttaagaagttctacatctttataatcgatatgcgtaataccattggaagtaaagtaacatacttttttccgacggcgtccgcctctgcgtcctccagccattgaaagttcctcctatcttaaagttcaaaccgctaaaatgaatttagaatggtaaatcgtcatcagaaatgtcgattggcttaccatcacttgcaaaaggatcattgttagtggattgataattttgattttgagattgttgctggtcctgtccgaatccaccgttattagtaggtgcttgtccgaagttatttccaccgttattataattattgttgttatttccgccttgatagttattatttccgccaccgccattagaattgcgcggttcaaggaattgaacactctcagctacaatttctgtcacataaacacgtttgccatcgtttccctcgtaattacgagtttgaacccggccatcaacgcctgccatgcttcccttcttcaggaaattagcaacgttttctgctggtttacgccaaacaacacaattaataaagtcagcttctcgttctccctgttggttagtgaacgtacgatttacagctaaggtaaaagtcgcaacggccacaccagctggagtgtaacgtaattcaggatcctttgttaagcgtcctacaagtactacacgattcatcatgcaaaaccaacctcctctcgtttagtaaatcaaggtcctagccttgaataaattcttatgcttcttctttaattaccatgtgacgaacgatatcatcagaaatttttgctaaacggtcaaattcgttgatagaatctgctttgtcagcattcaatttcacgatgtggtaaaaaccatcacgatagtcattgatttcgtatgctaagcgacgtttaccccattcttttgattcgatgatctccgcgccattttcagttaagattccgtcaaagcgttcaacaacagcttttttctcatcttcttcaatgtttgggcgaataatgtacataatttcgtactttctagccatctactctacacctccttgtggtcttaagcggctctgataaggtatgtaatcacaccatatccctgaaattcagactgcctttagcaagccttaaaatcaagagcgagcaaggaataatttataattactcacaataaaatattatatcatagcgcaaactaaccagcaagatatttctcgaaaatttctggtttgaaaacactatagcacatcttaaaaacagcgactatactttttgtgaaagtcgtattttgaggggaaataccagtttttcaaagcttattttagatttcccctagttatcggcattgtcatacatctaggacctccgcgccccctagaaagctccgagctaattacctcatgaaccttaataccagcctttcttaaaaggtcatttgatacgtgatttcgatcatatgtaattacttctcccggcgcaatcgcaagcgtattagcgccgtcattccactgctctctcgctgaaacaatcacatcttctccgccacaaggaataaaatcaacttctggcacacctagaacttcggcaatcactcgcttaaaatctctacgcggagtaatttctagcccgttctcacttttttctaaaatatagacatttagttcgccttgctggttttgaatagcaggatgaattgtaaactgcgcaaaattgaccattgtaaaaactgtatctaaatgcataaatgatcttgtttctggtatttcagctgccagtactcgcttgatttttggagcgcgactaaacaaactttctgctaggcgctcaaccgcacgcgcatcagttcgctcggaaacaccaacgagaaccgtttcctcattcaaaataagctcatctcctccctctaatgggaaaggctcttctcgaccagaccatatcgggatttcttgactactaaaacgaggatgatgttttaaaatgagctcaataaatagggactcccgtcttcttgcaggttggaacattttgttaattgttacaccactaccaatgactgcagccggatcacgtgtaaaatataaattaggtaacggatccaagaaaaacggatattgttcgtccatcatttcatttaaatgtttcttttttcgttctggaatttctgattttttcaatccggacatcagttttttaatcatttcttcttcatcaaaagacatcaaataatcacgtacatagagagcactttcatccatttgattggattctttaatcatttttgttaaaaaattttctttattactagcttcttttaaagcttctgctgctaatttttctaagtagagtacttcaatattcgagtcttgcatcgttttgacaaaaaaatcatgttctttttgcatcatttttaagtaaggtatgtcgtcgaataataacgactctagatattctggcgtgatattttccaactcagaaccgggcctttttacaaggacggtttgcagtttaccaatttcggatgtaatatttaaaccattttccatttctatcacctcttcctaaacaattaccccaaaacttatcatttatacatttcccgggaaataaaaaaaacacggaaattaatccgcgtttttttgagtcattttacttctaataaaggaaactaccatcggaattactgaaactacaatgattccgatcacaactaatgagaagttgtctttaacgattgggaaattaccaaagaagtagcctgcaagtgtacaaagtagaacccagacagtcgctcctaaaatattataatttaagaaataacgataattcatacggcttgctccagctacgaacggcgcaaaagtacgaatgaaaggcataaatctagcaatgaaaatcgtttttccaccatgtttattgaagaacgcctctgctttttccatcttttctttgttgattagttttccaaaccagctatcttctggtatcgatgtgccaatttttttaccgatatggtagttcactgtgtcacctagaaccgcagctaaccataaagtaatgattaggggaacaatatgtaagattgaaccatctaatacggataatgctccggccgcaaaaagcaatgaatcccctggtaagaacggaaatactactaggccagtttctatgaaaacaatcaagaacaaaatgatgtaagtccaaattccaaaattgtttataatctccactaaatgttggtcaatatgcaaaataaaatcaatgatgtacgtaataaaatccaccaggcactcacttccttttcttttttaaaagtcaaagtccattttaccacaagttaactctccgtgtatcagacttgtgacttatttatcaatttttaataattaaatgccttttctcttacttacgaaattcaggaagcagtgtgtaaaaaagactggaaaacccctacttacttcgggttttccagtcttttagtaatttttaagcgtagtctccaggttttgttttacttttcattgctacgccaaagtctgtgtagatacgttctgttaatttgttccctttcaactctgcaatgtgatgagctaagatttggaaaggaagaatcattagaaatggtgcttgaaattcatccaactcagcgggaatcgctagcgtacggtcattctcagctgtaccaaacttaatagtatacgtaaatggcgtgtatttggattcataatcgcgtaacagcactaatcgttctgtaactgcgctttctgtttctatgaagaaaattctatgctgcgagtttacttctaaatatgggccatgcataaacgcttctaaatcaagaccttgcgatggtacacgaactgtttctgagaattttgtttcaaattctttgcacgttccaactgttggaccataaccaatcgcagtaaactttggtgctgaagcaaattcatttttccatttttcataaaatgcttcggtttgggcaattgtttctgggatggcgtcggttgcacggttgaatgcactaatttcgttattaaaacgagtcccatcaatttgcgccgttttataagcgaaatgaaggcctgttagcattaatgtcaagactgttgcagtgaagccttttgttacgtaaccaactcgttcttttccacaacctatatcaagtgttatatccgcaaactcggcaatttcacttgttacatcactggttagcgcaactactggcacggaagcttcttttttcacacgttctagcgcggaaatagtcgatgtgctctgaccactttgtgaaataccgataactaaatctaggtgacttgataatttttcgtaatagagatgattgaatggttcttcaatagtaatgcgtacatcagctagattttcaatgtaatatttggcactttgggctgcattcaaacttgatccagtagctaaaatcagccattcttttgcgccattttttactaaagcttctaattgttctgcatttttttggaaattagctaaaattgatttgcacatttcctcttcttcgttaatataagtcatcattgttggtttcatttaaacttctccattcgttactgtttctgcttcaacgtttccagcagctttttgttctaaaacgtacgcgcggttagctacaagtacaaatggtaggtaaatgagcgttccaacgacgataattgcgatttgtaagatggaagcgcgaatgtccccacctgttgcaagataccctgaaaggacaggcggtgttacccaaggaatcaagatgtacgtttggctaatccagccccatgaagttgcaaaatacgccattgctgttgaagcaagtggtgcgataactagcggaataccgtaaatcgggttgaatacaactggcaaaccgaacataagtggttcactgacattgaaaatactagggattaagccaaattttgttaccatgcgatgatctggtcgttttgaggcaatgaaaatcgcgataactaaacagataattgttccgccaccacccatataaacaaacgcatctaaaaacggctgtgtaacaatatttggtaaagctgtacctgcattgacagcatcaatattttgttgcaaggaagttaatagtactggccctgaaattgcgcctagtacgaacgcgccgtgaataccaaatacccataagaatcccgctaaaaatacataaagtagaatacctggtaacgtttggaaaccgcctactagtgggatttgtagaacttttacgataatttctggaatactcattgatacaaaactaactacaagcacttcaataattgctaaaatacttagaactaagaaagatggaattaaaatgttaaatgattttgcaattgccggtggaacactttctggcatggaaatctttaattttttactttttgagaattttgcaagcattgtaatactaactaaagaagcaataatcgctaggaacatcccagttgaacttgtcatttcttgtgttaaaacgccgccagcctcaaacgcttttccgtcaacagacattaagtgcgaagatgcgggaattaagactacataagctgcaactgcaaccattccttccgtacgaccttccatcccatatgatttagctaaaaagttcccgattagaaacgccgctaaaatcgccataataccaagtgtcgcattataaacttgcacacctacacccaaataattttctacatttggaatgaatttaagcagaccattctctggttgaagcaaaacattatttacaagtaagaaaaatgctgcaataatcgtaatcggaatcattgctgcaaagccatcacgaattgccataatgtgtttttgcgatgaaattttttgggcaaaaattgataatccttcaataaaccgactagataaacttctctctgaactcatttttttgtcctcctatgactttcctgttattttgtttaaatccgctacaattgacatccatttgccggcattaccgacccaaacttccttataagttgcattattaaactccggccagtatggttcatcttcatttctaaaggtttccattccgactggtatctcccctgtgatttcgccgttaagcacactatactgctgcgcataacggtaaccttcgccgtgcatcattgattgtccaaatgggttcattcctattacccactgcaattgaccttctgcaatatttaacagcgccttatcttgcaaaattttcccagcaattgatgccgcttttcctgccgaaagtaaaatggcgttattgcctctaaacgagaaccagatcgggaatttccgcaacgcaatctcgtcatttattttgataccttgttcgaattgtaattggtattcttctatcgctcgttcatcaatgagtaaatgttgtaagtgaaaacttgcttcgtctaaatactcgtcttttttgtaaagtccggctggaatgagcggatacggtttagtgaaacgcgttacttttttcaaatagtcaccgtacatttcgaccgcttgtagccaagtttgtttttcagcgtgacctggttgcgtttcaagagccacctcaagtgccatcaaataaagatgttcacgcgcttgatgattgaaatgttgaataacattgtgcgttttatctcggtagaaaaatcctttgtaaagttcgctagtttcgctgtctttaatcccagttttttcttgtgcttctaacatcaaatccaaccactcagctgctttttctgcgtatatttctttgtttgttaattgataaaccatcgaagccgcccatgaagccgttgcgtaatacaaactttctgaggtttgatacgtatgctcccagaaaatcggtttttgcccagttccatgtttttcaagttccgctatcgcaaaaagtaaatcttcttccgcaattcgtagtagatgattctgcatagtggcgttatcctggatttggctgccgatatacgcttcaatccccgcacagtaaaaattctcataagcttgattatgaacccgcgcgattgcgtcatccatgccaccaacaaggccatccgtccaccgtgtcatcccagcacttgtcgctctaaaaccatctccaaagcgggttttcaatatgaaatctaatccccactcaccttcttctaaaaggcgcatccgtaacatttcatctttttcagataaactcgcagccatttcatataaagccatcgttacttcggccgtttgaataagttgttgcgaaacatcacccgcgtcatgccaaccaccattgaatgacagctgttttccattatgttcagcgataatatccgcatgacaagtcgtatgttttccaaaaatcgggcaaccacaacgttcacagaaaataaaattaagtgatttccagatagaagattcccaaatcacttcggaagtcccgaattggaatagttccgattgcatctcagcaaatttcaaataatactcacccacagtttgtaaatctgaaaaatcaagaataatgaaattgccagtttcggttgtattttggtacccttttccggtgaaaacgactttatttgtttctttttcgtggattgtaaaggaattcgcttcaagtttattggcacaaaacgctattttgggcatgtcttttgtgtagccgttgtgggaataaattagcgaattatcttgcggaatccagcccttggagatttccggctcactgatttgctctagtttaatctcactaatgaataactccattgttccagcagtcagtcgctctgggccattcaaataatagctaaaactaatttctgtcattttatcccgtggcaatccttcaatttcaaaaatgacatcgttccattcatggttgattaaattcacgccatgaacgccttcacgtccatatatatcaggtactttcacggttccatcatttttaaagctaatcattaaatatggattcgttacaccaggaaaatctgggaaaacttgaattctcacgcggttaaagctgttccaatcctcattttggagtggcgcagatatgagaacgttaccaaaattggtgtagtcaccgtcatctggcgcacctgctggccaatgtggcataacaactggagaagtcaacttaatctcaccttgatcagatataacaaaatcgccagcgccttgatgtgtaaaatctaaggaaacctgtttttcagagctaagtaacgttctacttgataaaacttgtttctttttcgctatcgtttctagcgcatgttccgtttcaattggaagtggtcgatgaataatacctgtttgcacaatttgttgcttcattttcggcttcattcttgtcctccttcatttcctagtctcattccaataactgccgccccaattaagccaactttatccttctcaagttgtgaacgaacaacgcctttcgtaacaaaacggattgtattactttgaagattagcttttatcttttggaaaaaatgctcgtttcttgtcacgccgccgcctagaatgacacattctggatctgtcgtccgaaccatattcataatcaaattagctagctgaagcgtggcgttatcaatgattttttcagccaattcatctttttgttctgctgcatgaagaaccatttttccagttaattccgttttactatcagcaagtaaggatgtagggtattcatttaaatgtctaagcgcttcttcttttattccaagaccagaagcaagacgctccacacagccgtatctgccacaaccacacagtacatcgctctgaatatctactacggcgtgaccaatttcaccagcgttaaagtgcccgccttgcgtaatgcgcccgtctacaacaaatccagcagcaagaccagtgccaacatttaaataaataaaatcgtttgtttctcgcccccaaccgaattgtttttcagccattgttgcgcaaactacatcattaccaagcctcactggcaatcctgttttcgcttctaacatttctgctagtggtgtcggatttgtttttcctggttcgatttccagccaaatgcccgccttataatctacgcgccctactaggccaacaccgatcccaatttgtttcgttgctataaaaccaatattttccgagtaatcatctagcgcatttagcagaacttctaccgctttggcttgattttcagtattgctcgggtagcttttggaccgcagcacctccccatcttttgttacttcaccgattaaaattttagtgccacctagatcaatgccgatgacagattcttgtatgttcaactattccacctcatttttggtaacgttaccaaatcaaaacgtttgttgatagcgctttctaacatagaataaccggataaatttaatatgtcaacacttttttgtttatttttgataacgttaccaaatttcacttgttatttagatccaaataagctacacttaaaatagctaaaaacgcttacgaggtgaatattcctaatgaaaaaaataactatacaagaaattgcgaaacttagtggcgtttccgtttcaactgtctcacgagtgattaataacagcccctcggtttcagcagcgaaacgcaagaaaatccaagcaatcatagacgaacacaattacacacctagcgtatttgcgcgtggaatggtcaataaacaaacaaaaaatattggcgtaattttaccggatatttccaatccttatttcatttcactcataacgcaaatccaaaaattcgcgctagattacatgttttcgacaattttattcaatacgatgcttgccgagccaaataataagaatagcaaacatcctttgacggaagaagattacttaaaaattattttagaaaaacaagtggatggattacttattttaggtggcgaaattgataaagaagttgtttcaaaagactacatcaatgctttaaatcagctaaatagagaaattccagttgtcgttattggttcaaaaattcccgaacttaactgtttatttattgaacgtaatttaaaaaaaggcataacaactttagttagccatctgacagcgctagatcacaaaaatattggctttattggcggggaagctggtgtaaaaatcacctcctaccgattggaatcttttaaggctgctatggctagttacaatcattcggttaatgaagattggattgttctttctgactactatacagctgatggttacgcggcgatgactaaacttctggaaaataacactactttacccactgcacttgtagcaatcaatgataatgttgcaattggggcgattagagcgattaatgacgcgaaactttcttgcccggaagacattgccatcgtcagctgcgatcagtttatgaatggcgattatcaaaccccgcgcttaacttcaatggatcaacacaatgaatatcttggaaaaatggcacttttgcaattgattagcgcaattaacggtcaagttgagccgatgataattaatcataatccagaattaatcatccgcgaatcatgcggttccaagctataatgaaaggaaggtttacttggaaaaatacttaatttgttctgatttagacggaacattactactaaaaaatcaaacaatctcaccaaaaacactagggttactgcaacaattaatagaagaaggtcatcatttcgccgtttctactggccgaatgtataattccgcaaccgacttcgccaaactggttcatccaaaagcagatgttattgcctcaaatggtggcgtagtggcagtttccggcgaaatcatccaacaagaaaaaatgaaacaatccgcattactagaaacatttttattatgccaagaccatgatctaccagtgtttttcttctcgactgacacggtttactacactaaaaatccaccttattattttaccgatgaagaagataaaggtcgcgtaaatgcaacaaaactcgttgcaattaaaacaaaagaaaccttcttggagcatgctaatcagttcattaacggcattgtcattgaagaagaggatttcgataaacttgcaatcctacgaaacgaattagaaaaactatctgatgtttctattctttcttctcatgcaaataatatcgaaattttgcccaaagatatggataaaaaatatgccgtgaaaaacctcgctgcacatttagacatcaaaccagaaaatgttattagttttggtgatggtgaaaacgatattggaatgcttgaagtagctggtgctggagtcgcaatggaaaatgcgagtgaattagtgaaaaaaagcgctgattttgttactactgcaaatgatgctgacggaatttattactttttaaaaaaatatcttaatcgttaataaaaaaagctgcccacgtggacagctttttttcatttattcttctactgaagcagcttcttcatagttaattagtgcaattaatccaccaacagcaagtaatacgattggtagtaagaacatgatggaaatcgacattgtacaaccaattgcagctgcaaccatcattgctccaccaagacggggtttatgcgaaacaacaaacgatcctgcaagtcccacccctgaaagcacaagcgaaccaattgttaacatatagaagaaaaacgattcctcttctaaagcctgtgaaatatcaggaataataagaaccatcaaactaaatccaatacccattgccgcccctaaaaagccaagtaatccttcaactttcatgataaaaactcctttttcatacgcattttcttttatgttatcattttaacaaaaaattgaatagttttcagcttggagaattaaaaaaagaccgacaatcaagtcggtccaaaaagggagtttaggattttaaggaattctacaattagcaaaaagggagtaaaactaattgtattccttgcttacaagttctatattaaaggttaattatgaacatttcgcaataaaaatattaaaaatttgttaatgtttcacgtgaaacattaatttttgctccaattaggcatggttttgcttcgacactatgaccgatttccttagttcgaaaaacaggtaacttatattttaatccaatctgttgatataagatgcctattctgtcgtattctccgtttttctcagcctcagtgtgttctcccacaactattcctaagcatttcgaaaacacatctaactgttctaattgcgctacgtaagaagcaattttcgcctcttttccacctaaactttctaaaaaaattattttattcgagacatcaggcataaattccgttcctgctagtttcaaaaagcagcggatatttccaccaacgacctcacccacgctccattcaaaatcagtaagggatttcccatttatcgcaatttgattctcgaaaaacgctttttggaattgcactcgttgtatctcgctagcttcacttactaaatttcgcagtaaataattaaagccaggttgtttcgccttcgcaaaaattgcatttaatattacggttaagtcgctatagccaataaaaggtttggctgctttttttataatgtcataattaagatatggtaatacttgattagccgcatcccctcctgaaatgtcaaaaatcatttttacatccacattttgatatagtttcattaattcggctgctcgttcctcaggagtaccactaaaaggcgaatcatctgtttgaaaaatagttttcgcaaaaaccacctgaagtccaaattccttttctaagacttgtttaaggcgcttcaaattcttctcttcttctttcttccgaccatcagaacaacaaatgatccctattaaatcgccctttgctaacatccgctcaccgcctatttttccctcagtataacataaaaacagcttgagcagatttacgcccaagctgtttattaatgaattttagatgactaatgtgattaaacgttcttctagtttagcttcttttgcatctgtaatcattacgtctaaatattgattggagtttgttactactactggagttgtaacatcatatccagctgctttaatgccttcaatatcaaattcagttagtaattgacctttttcgattacatcgccttgtttaacatgtgctgtgaagaacttaccttctagttgaactgtatccataccgatgtggattaatacttctgcaccgtcattcgttgtaataccgattgcatgaccagttgggaagatagttgttactgttcctgctgctggagctacaacgcgtccgacagtagggataattgctacaccttttccaagtgcaccggatgaaaatgcttcgtcttttacgtctgctaaagttacgatttcgccaactactggagctggaattgtctcacgttcgattaaagtttcgccctctgttacgttagtttcttctacaactgcttcagctggatctttgaatcctgctacataagttaagatgaaaccaaggatgaagctgataacgattgcgataactacccaccagaatgcacttgtaataccagcacctggttggaagaagttaggaagaccgaagattccaagtccacccatgatataaacttttgcacttacaaaaccaatgattcctccaccaacagcacctgcgatacagctcatgatgaatggttttttcagtggtaaagtaaccccgtaaatcgctggctcagttacaccaaagataccggaaataaatgctggaatactaagagatttgatttttttgtttctagttttgaagaatactgctaatactgcaccgatttgggcaaaagaagcaccgaacatcattgcaagtactggatctgatccaagcgttgttaagttgttgattgccactggaataagaccccagtgaagtccaaagataacgaatacttgccagaaaccacctaagattaaaccagcaacaactgggcttaagttataaacccaaattgtacctgctccaagtaattgaccagcccaagttgcgattggtccgattacaaggaaagtaattggaactactactaatagtgtacagaatggaactacgaaagttttaattacatctggaatgattttcttgaagcctttttctacttttgaaccaaaatatgttgctaaaataattggaataacagaagatgcataagacatcaagataactggaattcctaagaaagttacgtgaattggagattcaaaaattgttcctgcaaaaagtgtgtaaattgggtcacctgctgaaatacctgcaagcgttggataaactagggcaccaccaattgccatcccgataaatatgtttccgccgaattttttcatcgctgtgaaacctaggaagattgggaagaagtagaataaacaatccccaattgcataaagtagttggtaagtacctgaagtaactgtaatccaaccaaatgctgcaaacattgctgtgaaacctttaatcatacctgttgcggctaatacacctagaactggtgtaaatacgccggaaatcatatcgataaaacggttgaagatattaccacttgccggaacattactatcgtctccttcagctgaaataccaccaacttctaatactgctttgaatacgtctggtacgtggttaccaataacaacttgatattgaccaccacttttaattacggagattactccatcaagcttttcaatttcttttgtgttcgcaatattctcatctttcagtttaaaccgaagtctggtaatacaatggaaaacactattaatattttcttttccgccaacatttttcaagatgtcttttgctaactgttcatatttcattttgacgacttccttcctctttttggttttttgggcaaaaagaaaaacctaagctcattcgaggacttcacgtatacacgtgtcctacaaatcagcttaggttttgcccaatgaattggtaacaatcctttgtgatgagataaatatatcatataaagaaaacggttgcaagcctttttttaaattttttttatttggggagttttagcgctccccaaacaagtctgtaccatgtatttcagccgctcccgtttcttttgtaatccattccagattgtgcgatttaattcctccacctggtaaaataatgattcgtcccgctgcataatcaatatattttcgccaatgaacaaaagtttcttcgggaagtttagctccgtcaccaccgtgcgtgagaattcgcgtaacaccttgttcagctaaccagtctattgccggtaatttttctgtttctactaactcatcaaacgccatgtgaaaagttacttccagacctgttgcagctttcaataattcatttatggctggtttatctagtaatcccgcgtccgtaatacagccgaaaaccacgccatcagctaacaatttcttatacatcaaaatatcatcaatcataatcgaaatttcttcttttgtataaacaaaattgccttttcggggacgaaccattgccattacacttacattttgttcgtggcaaatttccaccacatgtttcgcaaccccgtaactaaccgaagttccgccctctgccaaattatcgcaaagttcaattcgattcgccccagctgcaataaatccttctaaattagtagtgttttcaatacaagcctcttttaaaaccatcatatagcctccaaaaaagcgcgaaaacaacgttcattttcgcgcgtgtttttattataaatggaaaatccgatcagcgaacttatcttcaatcgcaaaattgtattcgtaaccaccatcaatattagcactacgataaactggtggagtatagcctttttcaagcatcagctctaccgcttcatagatcgtttgctgaagaagtaatacggcggagaaagacgatgttccacaaacttttccttctaagccatctaattcaagtgccgcgtcgccttgaaccgagcgattatctaaaattacatccgcaaattcatacaacagttttcctgaagaatgccttgaggctgctgtttgcgaggcatcgagcgctgtcacaacaatcaatttacaaccctgtgccttaatccattcggcaagttctattcccattggattgcgacctgagttagatataagaaagaatatatcgtttggtttcgcttgtaacctatgagtcaataatgatccaacgccctcaatagattcatagtatccacccgcgggatccataataaccttcgacggaataagtccacccgctctcccacaaacttcaatcgccgctgcataagaatgtccactaccgaaagcttggataataccctcattcataatgctctccgccaccaatttcgctgcttgatgaatgttttctgcctgcgttttttctagttcttccgttaattcacgcgctttgtcaaaaaatgttaagcccattttgtctattcctccaatttttatattttaacctagaatttttaggttgaataaaataatcgcaataaccattactaataaaatcgccttcgtagatgtcatttttttatggcctaaaagtgcatagattagcgctacaagtaaaactggtaccagtgaaggcataatttgatcgagcatgtcttgcattttcagttctacttttcctgatttataaacgaatgggaccgttgctttgattacggttggtatgagggctcccacgactgtgacaccgagtaatattgctgcatcggttaacgcgttaagtcggtctgcaaattcagttaccaatttcgcaccttgcttatatccaagtggtagtaaggtaaatctagctcctacaaccaaaatattaactaaaacccagataactacacccgtcacattaccttgaagccccatatacgctgcaattgatccaaaaatggttggtaaaataactccgaaaatcgtatcaccaacaccagcaaacggtcccattaatccagttttcaagccggttacgacttctttggatgctttcttttcacgttcttcaatcgccatatccatccctaagatcaaaccaccgaccatcggattcgtattgaaaaattggttgtgcatattcatcatatcttttaaatcatcatctgttttataaagcttccgaagcgttggcaaaatactataaagataaccagtcgacatcattcgctcatagttccaacagatttggctggcaaacaaccaacgaaagtttgctgctattaaatcgcgtcttttgaggactttctcaaaatcatgttcagtcttcgtattcgccatcttcattctcctccccaactagcgctgcaccatttgctccggcagccactggatttttgaaattttgtttgaagtaaatgattgccaaagccacgccaattagcgccacacctagcattggtacttttaaataagccgctgctacaaaaccgataattaaataggcgacgaatttgtttgttggcaaataacgaagaagaatcgcgataccaactactggaagaattcccccagctacacgaagaccgcccattagccattctggaatttcatttagaataaaatcaaccacgctttgtccgaaagtcaacatgataaatacgggaaccgcgcgtgataaagcccatggtagcgccccataccaaatgttcctttttaccgccgaaatgttgcccgaagcgatattagaatcaatccgatgtaagaaaaatgtatttgtaaatcttgctaaaatgtctaattgaaccattaaaagccccactggaattgcaagtccaatcgcaaattccgcatcttgaccagataaaacagcaaatactgttcctacaattgctcccgttgtaaagtcaggaatcgacgcgccgccgtatgtaccgacaccaagcaccatcagctgtaacgttgccccaattgcaagtccgagcaccatgtcacccataatgattccagcaagtgtccctgttattacagggaaattaagtcctattactaaagttaaagcatcaagaatggtacaagccgcaagtataactaacaatataatctgccaaaccgctaaatccattgtagttctcccttcttattacttatttttttaataaacttgcaaaatcaactgcatcctcactaggcaccatttgagcggtgattttaatccctttttcagccaaataatcaaaatcttccaaattttcatctgtcacgcttactgattttttgacttggcggcttcctgctttggttgacatatttcctacgttgatttggggaagttctacacccgcatccactaaaccgcgaagtgcatgtggcgattttacgattaagaaaacttgctgacctacgtacttatcgttattaatattatttgcagcaccttttactgtcaaaatacttagttttaccccagctggcactgctgtttttagcgcaattttttccatgtcattttttacaacggcatcgtcaacaatcatgattcgagttgcttttattgtattagtccacattgtcgctacttggccgtgaattagtctttcatctacgcgaacgtgtttgattccgttacttcccatcagtcctcttcctccccatcatcgcttattatcgtattatttacttttaattccacaaattgaatattttcttgcgcgccaagcattgctccttctaaagtttcccctagactaagcggaatgattaatccgagtgacaacccagacacaaccttcacttctgggtgttttgcatgaaacatttgcgcggcattacacggagttccaccgacaatatccacaatgatagcggtttcatttccaggtgaataaactgccgcgtatgcttctaatacatctttcacccccatttcttcagtaaaagtaactgctttgatattcgttgtttggccagtaatcatttggcaactattcttcacttcctgcgcgtaccggccatgtgctgcgataatataatccaagtaattaactcccttctattgttttttcttttcgatttcaatagagtaaaaattatgccgtaaataactttcaatatattcatagggttgcccctctggcacataagttattctttcaatgtggtaaagcggtagttcggagtcaatttcgagtaatttaaaattatttttgtcttttactggaaattcgacttgaattcgctctttcatcgcttcgtgcagaatattaataccataaagctctttaattacttctgataaagaattaaatctttcaaaattggttaaatctacgttgatcaaattggcttttgccatatagttgttttgtactgtccaaggcacatcatcaatcagacgaattcgttgaaaatgaacaatcatgttttcaggtggaatttgcaagtttttggcaattctcgcatcctgaatttcattaatagctacaacttttgtgtgctcgttagcaatttttgtttttcggttgaatttaccattaggaacggtcgtatattcattaaaaataacttcttcgttaataatagatttactaacataggttcctttcccttgataacgcgctaaaattccagctcttactaattcatgtaaagcgcgaacaactgtagtattactaacattgtatttctttttcagttcatcttctgaataaattttttctcctggcttaaaagttccgtcactaattaatcgcttaatatcattgattataatagcgtattttggttctgccataacaatttccccctaaagcatcccgcgcgttaacacgttaagttttaggttaatggtaccatgatacatttttgattgcaaacttgaattcgcctgctatcactgaactttatactaataaccggttaacacgttaagttcattttcatagtaccacggccattctatttatgcaagcgttttcttttcattttaaaaaaatagggtataaataagtaatctgaatcagagggggatataatggggactttttttggtaaatgggggaaatggatacttgttcttgggttagttttaagtgtatttagtgtagcaacgaccggtcaggcagcggcgaaagaaactgtgattaataaacaaatggtaacaaccgcaagccttaatgtccgttcaactaatgcgacatctgggaaagttattggttggcttaaaaataatactaaatttaaagcaatcgcaaaaacatccaacaactggtatcgctttagttttaaagggaaaaatggctatgtatctgggaaatatgtaaaagccgcaaccgctgcacctacaccagcgccatcaacgccaaaaattgtacaaatgaacgtgccattaattgttcagcgtccacaattaccaacgggctgtgagattactaatattgcgatgatgctgcgctatgctgggaaaaatgttgataaagtcaagcttgcaaaagaaatgaagcgacataaatccaatccaaattatggttttgttgggaatccgttctctaaaagtggctggacgatttatccaccggctttagtaaatcaagtgaaaaaatatactggcagcgcgaagaatatgactgggacaaatttagctggtattaaaaatcagttgaataaaaaacgtccggtcgtagcttgggttagtaatttccatggtttttccgttcacgcgatcaccattaccggttatgataaaaacaatttttactataacgacagctggtctggtcaaaaaaatgcgcgaatttcgcaaagttattttaatacttgttggagtaaacaagcaaaacgcgcgatttcatattaaaataaaatccccaccttcatcaccgaaagtgggggtttactatatcctagtcgatatctttaccatttgtttcaattacttttttgtaccagtcgaatgattttttcttcgagcggtttagggttccgttgcctttgttatcgcggtcaacgtagatgaagccataacgttttttcatttcgccagagccagcgctgacaaggtcgatgcagccccatggtgtataaccaagaagttccacgccgtcctcgattgcttcgcccatttcgcgaacgtgttcacgcatatagtcaattctgtaatcatcattgatagagccgtcttcttccactgtatccactgcgcctaagccattttcaacgatgaaaagaggtttttgatagcggtcataaattgtattcattgtaatacgtagacctagtggatcaatttgccaaccccattcgcttgcttttaggtatgggttttttagtgttgcgaaaacgttgccttctgtttctttgtttttctctggatctgcgcttgttagacgagaagaatagtagctgaatgccacgtaatcaactgtgtgatcgcgtaatgcgtctaagtcgccatcttccattttgatattgatgttgtgttctttgaagaaacgtttagtgtagcttgggtagtatccgcgcgcttgaacgtcaatgaagaagtagccttcacggtccgcctcgatagatttccagacatcttttggattacaagtcattggatacgtgttacccgctgcaagcatacaaccgatttgattttcagggttgatttcatgaccaagttttgtcgctaaagcagatgcaactaattgatgatgcgcagcttgatatttaacttcctctggattagcttctttagtaacgtctaaacctccaccaatgtatggaagatgaagaatcatgttgatttcattaaatgtcatccaatattttactttatctttataacgcgtgaaaattgcttcacagaaatttaagtaaaagtcgatacatttacgatttttccaaccaccatattttttgaaaacttcaagcggagtatcaaaatggttgattgtaacaactggttcgatgccatatttatgacattcatcaaaaactgcatcataaaacgctaaacctttttcatttggtgtcgtttcgtcaccattcgggaaaatacgtggccagctgatggacatacggaaacatttgaatcccatttctgccattaatttaatgtcttctttataacgatgataaaaatcaattgattcgtgacttggataaaaaccataatctgtagcaagcgctttcgatggattgaataaagcttcccagcgcccatcctctactgttggaaggatgtcaacaagtgaaagtcctttaccgtcttcaagataagctccctcacattggttggcagcaactgctccgccccataagaagcctttaggaaattttgattctgtcatttttgtgtatctcctctcacggatataattttacttctccactatagaatatgtaatgcattacatagcaagcaataattttaaaatttttttagaagagctgttaatccctttaaaaatgcaaaaaaactggtacagaaaatgaattccataccagccttttttaaattataacaagtgattcatatggccaatttccattacccaatatgaaccaataactacgacaatcgcaataaatgctgcgaataaaatattaccaatttgaattttgccatcgcggccttcagtcatatgcatgaacatcagaagctgtagggctgcttgaatgaacgcaaagatgaaaataataactaccttaacatttgttgtaagcgtcgaataaatggctacccagactgctagaagcgtcaaaataattgatagcgcgaaaccaacaatatgtttccaaggaatgccaccttcagcatgagctgcatttgatttattattttgtgccatattagttcaccatccctagcaaatagacaccggtgaaaatgaaaatccacacaacatcaaggaaatgccagtataaactggaaataaatacttttgatgctgtttttggcgtcaaaccatgcattttaatttgaattagaataaaactaatccagaaaatcccgactgttacgtgaagtccatgtgtccctagtagaacgaagaatgctgaccagtaagaaccgatttgcattgtaacgccctctgtcacatagtgtgcaaattcataaagctcaaagccaacaaatcccgcaccaagaattaatgtgataatcgagtaaatcgtcaacattttcacattgcctttacgcatctcaccaattgctagaccacacgtaaaactacttgctaatagtaaaaatgtcattattagtactagccaaagttcgaacatttctgctggcggatgacccgcattcgagccagcctttctcataacaaagtaagtcgcaaaaagcgtcgcaaacaatgcaatttcggcgccaaggaaaatccagaatccaagaatatttaatcgaccttgttctgatctatattcaattggcagatttttatttgtttctacagattccatgggttaccctccttcacaccagtcgcaagttcgcgcgcattatgttcttctgttgctttaatttcgtccacttcaacgtggtaaccatcgttattttggaatgaacgataaatcatacatcctaaaataccaactaggccaataattcccatccagtaccagtagaagactagtccgaaacctgcaatgaagaagaagacagacattacaaacccaaccatggtattacttggcatatggattggtttataatttttatcatttacatatggatcgcctttttgttttctattccagaaatcatccaagtcattccattctggtaaaacagcaaagttatattttggaggaactgcagaacttgtagcccattcaagcgtacgagcatcccacgggtcaccagtaacttcacgtttagagtttttatagctgtagtagatgttgtagcaaagaactaagaatgctacacccatcaagaatccgcccactgtggaaataaagttaagcgttgtccagccatcaccttgtacgtaagtgtaaatacgacgcggcataccatctagtcctaggaaatattgcgggaagaaacaaacgttaaatccaacaacgaaaatccagaagaaccatttaccaattttttcatttagtctgtaaccgaccatttttggataccagtatgtaagcccagcaaagcaggagaatactgtcccagcaattaatacgtagtggaaatgggatactaagaagtacgtattgtgatattgataatcggccgcagccatcgcaagcataaccccagttaccccaccgacaacaaagttagggataaaggcaagcgaccaaagcattggcgttgtaaaggttattcgccctttgtacattgtaaagagccagttgaatatcttaatcccggtcggtatcgcaatcatcatcgttgtaatggagaagaaggagttaacaagcgcccctgatcccattgtaaagaagtgatggacccaaactaggaaacttagtaaagaaataactgccatcgcggcaaccatcgccggataaccgaataattttttcctggagaaagtagaaataatctctgagaaaataccgaaagctggcaaaataacaatatatacttccggatgcccccaaacccagaacaagttggcccacatcattgggagcccgccattcgtgagtgtgaagaatgctgtcccaaacagtcgatcaaatgacatcaaagcaagtgccactgttaaaactgggaaagcgaaaataatgatcaaacttgtaattaatgaagaccaagtaaacattggcattttcattaaagtcataccttttgtacgcattcttaaaatcgtaacgaaaaagttaatccccgtcatcagcgtaccaataccagcgatttgaacacctagaagatagaaattaattccatatccagcgctaaaatctgtcgcaagtggcgcatagtttgtccaaccagcatctggtgaaccaccaattacgaatgataagttaaatagcatcgctcccataaagaacgtccaaaaacttaagttgtttaaaaatggaaatgctacatcacgcgcaccaatttgaagtggtacggcaatgttcatcaacccaatgataaacggcatcgccatgaataaaatcataattgttccgtgcgtagaaaatacttcattgtaatgctgtgcgtctaaaaatttcatgtccggtaaagcgagctgggtacgcatcattagcgcatccacgccaccacggaaaaacattaagacagcagcaagcaagtacataatacctatttttttatgatcaacggaagaaatccactctttcatgagccacttccatttttttgtataagttagtaacgcgacaacaccaatacttacaagtacgatagaaatctgcgcacctaaaatcatcgggtcaccagttacgataaactcattccatttcatgccttatgtccccccttttagttccctgcgtcatccgattcttttttattgaattcatttgtttggatgtcttcttccattttcttcatttcatcttcgcggtgtttatcctcatggtaaccttcgccgtttttaataatttgtggcttcatatcatgacgctcaaattgcggattagttactgtcacaggacgaaccggaagcattggtttatcagaaatggttgattttgtgttcggattatgtggatttgtcatttcataaccaaaacgtttgtaggcatagaaaacatactctggatcagctgctacatcaacaaatgctaaatgcgtaccagaataagtttttttcttggagcttccaggaattaaaagacggtcatatgtgtcttgcgtaataactggcgagttcgcttttgtttcttttgcccatttcttgaaatctttttcagattgagctactacgtcaaagcgttgatccgcaaatccttcaccattgaagtttgcgttacggcctttatacgtaccaacctcatctgcttgtaaatataaattcatcgtcattccagacatcgcatatttttgtccacctaattgtggtacccaaaaacttgtcattgtatctgccgaagttaatttaaacagaacaggacggtcggttggaatatttacatagttgactgtttcaattgactcatctggataactaaaaatccatttccagtctgcacttgttgcgtaaataacaattggatctttatgcgaagtcacttttggtgcttcttcccctgcataaattgtttttacagtcggaatagccagagcaataacgatagcaactggaattaatgtccaaaaaatttccagttttctactaccatgcatatctggctcatagtttgaaatgtctttccgttcgcggtatttaaccaacataatcgtaaacaatacaaaaatcgtcaaaacaataaccagcataaatataatcgaataaataattaagtccgactgaccttttgcaactggtccttttggattaagtaccgtcaagtcaccacaaccacttataaggccggtaaccccaagtagtgccgtaagtagcaaagatttaagtacctttgacacccgaatcccctcttttccttttgatgttttctaatgtgtatttttgcgcaaaaataccattaccggagtgctgaaagaagctttttagaactcctatgtaactgaaaaaatgctttactatttgattcttttaaaaaagctcacaaacttttttctgaactgattagcatttttagaatcactatgttcatactctaactcattatatctgatttaataccttagttcaaaaacctgatatattaaatatttcacaaactttcattctgttcactattccctagattgtgaaattcgaaacaaaaaagcaacaaactatttattttagtttgctgcttaaaatttattcagtaatttgaactctccctgtatggaaaggtaaatgtttaataccaagcttttcccactcattgacaagtttttcggctagttctttcgttttcgagaaagctattccgcagtcgccaccaccagagccagatgattttcctgcgccgcccatgttttcggctgagtccgcgagttcttttagcaagcttgtttcaatatttacgccagcttttgttccgagttcttgaagaatgcgccgattttctttaatagatgaatagagcaattcctcgtctttcgtatggaaagcttgaattatttgcttcataatctcattatttctagttaaaaaatgttgataattcttgctatcttcttgcttaaatgcatgaatttgcgaaactagttttccagtacttacaggtgtgcccgtccaacctacagaaaaagtcggtactggttcttctaatgtttcaatttgaagcattggccaaggctctttcataaaccattcgagtgatttataagccaaacgatgcttcacccattcttgatcaaacgtcgtataagcaatccagccgccatacatacaagaagcaatatcaccacaagaaccattaccttgcacaactaaatgtgaaagggcagctagtttgaattttttaagcattgatatttctggataaaatttcgtcattaacgcgttgattacagcaaccgtagccgctgcgcttgaaccgagtccatattttgcgccagactgatcgattaattctgtttcaatgaccatcttcacaggagttagttctataccttctgattttaggaaagttgtcgcgatattaattgcttcagctgtaaatgtccaatgttccccgtctggtttaagttctccgccaattggccatgaaactggattttcataatgtggaatccataattcattgcgttcactatcttcaagagttagcgttatataacgattaactgcagttagaatggctgtgtgaccggattctaccaccgcatactcaccagcaacatataattttccgggtattttaacctgtagtttatttttcatctgatataacactcgcttccttaccagcgtggcaaattagaacgtttttagccaaacctgacaacttctctgctacaatattttcattttcacgctcacaaataactttaacatttggaccagcatccattgtgaaataggctggtatgccgttttcacgcaattctctaactgcatccattatttctagcgacaaaggttgaaaataagtgaaaggaggctctgcaccaagcgttgtcgcatgcattttcattccgtttcgttctgtgatttcgccaactttgatgaaatcttcctccaaaatagcttgtttcatttcttccaagtctgtttcagcagcagaaacccatttttcgaaaaacggagatgtttccacagttaggcgcattccatcccgactagaaactttcttttctttatcagaaacgactgcgactacaagagacattttgtcacataatttattggtgaaaggtactgcaaatgaatcactaccgtccgcgagttcgcctttttcccaaatgacaaaatctccgaaaacggaacgagaagcagaaccagacccgaaacgagccagtctggaaatgtattcttttgtgtcttttctgccagcagcgctagatccagcaagcgcaagagctgcaaatgcagaagccgatgaagcaagcccggccgcagttggaacgtgattttcggaagtgatttttgcttttgctgaaataccgaattcttcacgcattttatctataaaacgagctacttttgcatccgttttttgttcattatttaaaataaaagtatcctgggctaagttttcgtcccattctaccgttgtttttgtataaaatttatctaccgtgaaggataaactactgtttgcaggtagaatcaagtgttcatcgcgttttccccagtatttaattagcgccacattcgtgtgtgcgatggctgtcgctctcataactaccttctccaatcgtaaaaatccattcttgtgcagctccagcattatgaagcgccttcgttatttgtttagcgatttcttgattttttgctacagcgataatacatccgcctctaccgccacctgtaagttttgccccgtccgcgccattacttctagctactttaattaatttttctaaactgctatcactaactgtcaaagtttccaaataagattgagctttattcattgcagcacctatcttcacagtgtcagcatcgccttctaaatgcaactttatttcccgggaaatatcaccgagttggtggattatttttcctatttcagcttgattttctttgtataaaatttgcacatcttttactgcatctctggtttcacttggaacgccagtatctgctactacaaaagtaatttttttaggaaaatgcataatttctagttttcgatctcgctcataccatacgggcttttcactcacgactgtaatcgcatcaactccactagcatttccgtgggcaattttttctgctgcatttataattgctaatagttttttagagtctaattcttgattgaagtatttatataagccacgcgcaatacttgttgctactgcagcacttgaacctaatcctcggccaatcggaacgcctgaagttacatgaatagatacattttcaccattaccaatttcatttaaaacatctactactaatgctttgattcctgctaagaaatcaggcatattttctaaatcacctgtaaaaaatgccgaagaaaatttggtttttgtagaagtttctacatttgtcgttactattgcttgtgtaaatgggactgaaatcgccggttctccgtatacaactgcatgttctccgcataatatcattttagctgtcccaatgcctgtagccaatgcacgccaatcctttctccatcaaaataatacaaactttaatacttcatgataccataattttttcactaaaaccttattatagaactttttttgacccaaaacaatgactggcgcaacttttcccacgccaatcaccttttaaatatccatttcttgatattgatgttgaaaaatacacatccgaattgcatcgtggtatgttccatcaacaaaaaattcatcaattagctcgccttcacgaataaaaccaactttttcatagacatgaattgctttttcatttactttatcaactactaaatatagtttatgcaggtttagtacatgaaaagcatatttcatcgcgagttttgtggcagaaacagcgtaaccatgcccctgaaacttaggatcaataataatttgaaattccgctctccggtgaatataatcaatttccattaactcaactagtccaaccatttgaccatctaattctaaaataaaacggcgctctgattggtcgtgaatgtgcttatcatatagctcctgaagctcgacaaatgcctcatatggctcttcaaaccagtaagacataattttcgcatcattatttaaccggtgaacaaattttaaatcttctcgttcaagcggtctaagttttaaatctccactcatttttccactcctaaattataaaattggtgatagtaaactggatagaacttcttttatacgagtcaataatggtttattttccatatctttcatcgtaaatagtcggctatcttcaaaatctttcttaaaatcacgttttaaatgaagcatagcctcactttcatcatataagaataccattaattcatgattcaatctaaaacttcgcacgtcaaaattggcagttccaatagccgcacgtgttccgtccacaagcattgcttttgcatgaacaaaagagtcatcggcataagcatacattttcgcgcctgcttcaatcatcgtttttacataagcattacttccgtggaatgaaatcccgcgatcgccttttccaggaataataacccgtacgtcgacaccactcattgcaacccggcgaataaccgcaagagcctcctcatctggaacaaaatagggcgatacaatccaaactgattctttagcggaatcaatcaaatcaagcatcgaatcacgaacccatttttctttatcatatggtccgccgtatatcacttgcgcccattcatcacctacatcaactggtgaaaaatattgttgtaatccagcttcactaataaattgatcagcagccccagcctgattttccatataaatccaatcatttagaaaagattcttgaagttcgataacagcctgtcctgtgattttcatgtgtgtatcacgccagacacgaaaatctggtgtattagagcgatattcttccccaatgttaagtccacctgtaaagccaatttgtccgtcaatcacaacaattttacggtgatttcttaagttggctgttcttacaatccaaggggaggcaattgggtcaaatgcgtgaatactaactccagcttctttcaaaggagctaaaaaggctttactcagtttgcttgatccaagaccgtcaaacataaacctaacctcaacaccggatttcgctttttccaccaaaatatcacgaatctctgtagaaatcgcatccgttttaaaaatgtaatattgaatgtgaatatggttttcagcctttctaagcgcgtctaggagcactggaaaagtttcctcaccatttgttaatatttcaattttatttcccttaatcggctctatggacgttaaatgcgcaattcttttagaaagccttggtaatttttcattggtgttgtttggaattgcatgaatcgcattaattaatttagctttttccatcacttgagctgtactgaattttctagttgctggatttctaccaaacacaaggtaactaattgttccaagcactggcaaaatgaaaataacggcaatccaagcgacttttgagctagtattccgctgatcgaacagaagtagccgaattgcgataataaccccgcatagttggatgattccacttgttattaagaataagatagctgcttggttgattaaaacatattccactaaaaataaaactactgctataaacagaaattggaccagtttgcgcattttttcaactcttctcttttttagacgtattaaagatattatacataaaatacagccaaaaagcgctttttaatgctgaaaaaaagctggaaaatcattctaattcataaattagagtcatttccagcttcgttttattcttctatgtcgcttccaggagcatcttcaaaactttcatcaggaacttgtgtgattagagtttcgtcgatttcttcctcaagctcaacttcatcttcttcttttggcacttttgcaacagtggctactttttcatcttcatcaaggcgaattagtttgacgcccattgcgctacgaccagtttgagaaacagtatcgatttcaaaacgaattaatacgccactcacggtcattaacattaagtcctcttcaccagtaacagttttcattgctactaaattaccgtttttctcagtaattgtaacggttttaacacccataccaccacgattacgtagcggatactgggaggctggcgtttgtttaccatatcctttttctgttacaacgagtactttttcatcgtcttctagtacttccataccgataacttcatcgtcttcacgaagtctaataccacggacaccggcagctgtacggcccattacgcggatattttcttctgggaagtagatagattggccatgtttcgttgcgataatcatgtttttgctaccatctgtcatttgaacagagattagttcatcgttttcgcgaagttctacagcacgaagaccactttgacggattttcgcaaattgagaaagggtggtacgcttcacgacaccgtgtttagtagtgaagaataggtagctgtcatcagtgaattcggatagatttatcacggcattcacttgttcttggctttcgattccaagtaagttgatgattggaatacctttcgcggtacgaccgtattcaggtacttcataaccttttgaacggtaaactttacccgtgttagtgaagaatagtaacgtatcatgcgtgctcgttgcaacaaggtgctctacgaaatcatcttcatgagtagacataccttgaataccacgaccaccacgacgttggctacgataagttgataatggtaaacgtttaatatagccacgtttagttagcgtaatcgccacttcttcttcagggattaagtcttcatcttcaaggctcactaaatcaccagccaagatttcagtacgacgtttatccgcatatttaactttgatttcttctaattcttcacgaataatttcaagaatacgctcatcatcagctaaaatggcttttaaatcgttaattaatgccactaagttttgatattcttcttcaattttttcgcgttccaaacctgttaaacgttgcaaacgcatatctaaaatggcttgcgcttgtttatcagaaaggttgaattgagtcattaagccttctttggctacatcagaagtttttgatccacgaattaatttaataatcgcatcaatattatcaagcgcaattcgtaaaccttctaaaatatgagcacgcgcttctgctttacgaagctcaaattccgtacggcgacgaataactactttttgatgttctaaataatgataaaggatttcttttaaattaagtacttttggatgattgtcgacaagtgccagcatattaataccaaaagtggtttgaagtgctgtcattttgaataagttattcacgataacacttgcgctaatatcacgacgaacttcaatgacaatgcgcattccggaacggtcagattcatcgtttagagaagtaattccgtcaatttttttctcacgagctagttcggcaatacgctcaactaggcgcgctttatttacttggtaaggaatttcggtaataacgattgtttctttaccatttttcttttcttcaatatcaacacgaccgcgaacggtaatagaaccacgaccgctttcataagcacggcgaattccgctacgacccataatcatcccagcagtagggaagtcgggtcctggaatatgttccattagatcacgaatactaatttctggatcatgactaagggctaaaacgccgtcaattacttcacccagatgatgggtaggaatattcgtagccataccaaccgcaatacctgacgaaccattgacaagtaagttagggaaacgtgctggcaaaataactggctcacgttctgaaccatcatagttatcagcataatcaattgtgtctttgttgatatcgcgcagtagttccatcgaaatttttgacatacgtgcttccgtataacgcatcgctgccgccatatcaccatcgacagaaccaaagttaccatgtccatcaactagcatattacgataactaaaatcttgcgccatccgaaccattgtaaaataaaccgctgtatcgccgtgggggtgatacttaccaataacttccccaacaatacgtgctgatttcttatacgctttatcagaagtcatacctaggtcattcatcgcatataaaattcgacggtgaactggttttaatccgtcacgaacatctggtagggcgcgggcaacaattacactcatcgcatagtctaagaatgatgtccgcatttctttattcaagtttatctctgttattcgttgatttggtgtttctgccattgttagagaaacctccctttcaaaagtaaggctgaatctagttcataccttttaaaaacaattaataacccaattattacccgggaaatatttattaaacatccaagtttttaacgtattgcgcgttgtcttcaatgaatttacgacgaggttccacgcggtcacccatcaacatttcaaaagtttcatcggcatcaatagcgtctttgatattcacttgaagtagtgtacggtgttctggattcatggttgtatcccaaagttgctctgggttcatttctccaagacctttatatcgttgaatgctgtatttagtgtctccatcaaggcttgctagataatcttctaattgtccgtcactatatacgtactcgatttgtttaccatgcttaatttgataaagcggtggttgtgcaatataaatataacctgcatcaagcagaggacgcatataacgataaaatagcgtaagaagtagtgtacgaatatgtgcaccatcaacgtcggcatcagtcataataattaatttgtggtaacgagatttagaaacatcaaaatctccaccaaaaccagtacccatcgctgtaaaaatagttcgaatttcttcgttagctaaaatacggtctaaacgagctttttccacgttcaaaattttaccacgaatcggcaaaatcgcttggaataaacggtcacgaccttgtttagctgaaccaccagctgagtcaccctcaacgatgtaaagttcgctaatttcagggttacgggaagaacagtcagctaatttaccaggtaagctagaaatttctagaccactgcttttacgagcaacttcacgggcgcgcttagcagccaaacgtgcacgagaagccacaacgcccttctcaacgatttttttagctacatctgggttttccatcataaatttatttaaagcctcagaaaacagcttatccgtgatagaacgagcttctgaatttccaagttttgtttttgtttgtccttcaaactgtggatctgggtgtttgatggaaataatagcagttaaaccttcacgaacatcttcaccggaaagattatcatcactatctttaaataatttatttcggcgcgcatagtcgttaataacccgcgttaaagccgttttaaatccagattcgtgagttccgccttcatacgtatgaatattattcgcaaatgaaatgatattacttgagaatccagtattatattgcatggaaatctcaaccataatgtcatcgcgttcgccttccaaataaattggtggctcatggataacgtcttttgctttatttaaatgctccacgtaagaacgaattccgccttcatagtggaaatctttacgaactttgtgctcttcacgcttgtcttcaatcgaaatagttaagccacgattcaagaaagcaagttcgcgcgtacgagtacgaagcgtatcaaaatcaaattctgttgtttcagtgaaaatttgtggatctggcgtaaagtgaacaatagttccacggtaatctgtttcaccttgtacttccatatccatgactacatcaccgcgttcaaaacgttggtaatatttttgtccttcacggtgaacgtatacttcaagggatgtggaaagggcattaactaccgatgcaccaactccgtgaagtccgcctgatactttatatccgccgccgccgaatttaccgccggcatgaagaactgtaaagattacttctactgttggacggccgattttttcgttaatcccagttggaattccacgtccgttatcgcgaacagtaatgctgttatcagcttcaattgtaatttcaatttcagtacagaaaccagcaagggcctcatctattgcattatcaacaatttcccatacaaggtgatggagtccacgttggctagttgaaccaatgtacataccaggtctttttcttactgcttctaagccttctagtacttgtatttgatcttcgttataatctgaagcactttcatgtacatttgtaatattttcttctgacattaattattccaccgcactttctttttcatcaaattatattaacctaaattaggatttttttactgtacctttttctacataaaatgtcgttgcttgtctaagcgtattgtggtcgattccgctcgtacttgtggttgttacaaaggtttgtacttttccttcaatagctccgagcaaatgcgattgacgataatcatctagttcactgagcacatcatcgagtaagagaaccggatattcaccagtttcttcatggataaggtcgatttccgctaatttcacagaaagtgccgttgtccgctgttggccttgtgaaccaaaatcttgcacattttgcccattaatataaaacagagaatcatcccgatgtggcccaataagtgtgacaccacggtcgatttctctttgtttgattgattccattttttgaagtaaatcagctttccacacttcgggatcgtccccattaagggtgacagaagctttatactcgattttaagtgtctctaatcctcgtgaaatttggtgatgaattggcgctgcatatgcctctagtttttgaataaaatcagctcgtcttttcgtcaaattaatggcgacatctgcaaattgctctgttaaaatatcaagcaacattggatcaactttacgtttcatttgcaacatcttcaaatattggtttcgttgctgcaaaatccgctgatattcacttaaattatgcaaataaatcggctgcatctgtccgatttccatatttaaaaatcggcgcctaactcctggagcacctttcacaagcgataaatcttctggggcaaaaataaccacgtttaaattaccaacatattggctcaatttcttttgttccaaatggttgaccttagctcgcttgcctttttgggtgatagcaagctctaaaggcactgtttgcccgcgcttcactactcgcccttccattttggcttcttctttttcccacataataaaatctttatcattggttgtccgatgtgattttgcaagagcaagcatcaacacagcttccaaaaggttggttttaccttgtgcattctctccaaggaaaacattcacagacggggaaaattctagttctaagttttcataattacggaaatttcttaaaacaatgctttctaaatgcatctgctattatccttgctcaattttcacttttccaacaccaggaactaagataacatcgccattacgaagctttttcccccggcgattatcttgctctccgttgatgtaaatcgtattttcactaaggtacgcttttgccattcctccagttgaaactacatcaatcatttgtaaaagttgaccaagcgttacgaactcactatttatctttactgtttcagccaaaaatttcacgcccaatctttttttatcactaccttctattttactaaagttttgctaataatacaaagaatattttcatatattcgtttttcagctttttttagcaaaactaatggggggatattatttattaaaaaaaagaaaatatgagcttctgtggcgtttttttattaaaatggttattttcgtcggataactgcctttttttgccaagctcctgatttatatcgccatactccgagcatcgtcgcggtgatccaagcaactggggtcgcccaccaaagcccaacataaccaatataaagggataaaataaatccgatagcaagccttgaaactaactcgaaaatccccattgctaaaggtaccatcgcatctccagtaccacgcaaagtttcccgcacaacaaataaaatccctacaacgacgtaaaatagcgacactataagtaagtaactcacaccaatattaataacttctgtctcgctagaatctacaaatagtaataaaaattgccgagcgaaaagttgaactaaaatcgttattccaatgctgatggctgtaactacttttattcctgaccaaaaaccttcgcgaacacgatcaatttttccagcaccgatattttgaccagcaaacatcgaggaggcagctccaaaggcaattcctggttgatatgtaagtgaatcaattcgactcgctgcagtatatgccgcaacaacggacgaaccaaaaccattaattaaactttgaagtgccatattcccgatagaaataaatgatccttgtaaaccagaaggaagtccaattcgcaccatttctttaagtagtggggtagaaagcttgaatttggcacgctctattcgcataaaagacacgtggcgataagcatagtaaataacggcaattgctgcagctgtttgggataaaaccgttgcaatcgcagccccacgaacgcccatacccatataaacaacaaataaaaaatctaatgcaatattcattaaagacgataaaatcaaaaaaatcagcggtgtaatcgaatttccaagagctcgaagtatcgcggccatcccgttatacagactcatcggtaaaatcccaataaaaagagtggttaaaaagatagtagaatcatccaaaatattagcaggtgttctcagtaaaataaggagtggcttcgcaagtaaaacgccagcaatggttaaaataaccgccgaaaaaaccaccgcatacgttgcagtagcaattacatcttttaaacgatcataatctttaaaaccaaaatactgcgctactacgacagaaataccgctcataagtccaataatcaaagaaatcataaaaaaattgactgagtttgtcgccccaactgcagcaagggcatctacacttacaaatttcccgacaataacggcatcaatcatcgtataaaattgctgaaataagtttccaatcaacatcggcatcgcgaataaaaagattaattttgtcgggttacctgttgtcatgtctttcatcatgctaagaattacctccatttgcataaatatacatttttattcaaaatctgtactataacaaaaaaagaatccgccttgaaaccaagacggatgtgcttttttgcgagattagtaagttctaaccggcgtgattaattgtaaaatttcatttggattagtagcatcttttggtcgaagtacgaaaggtctcattgtgccagagaaggagatttgaatatcatcgccttcaaatgcgcgcaatgcatccatcatgtatttaccgttaaaggatattttaatttcttcaccagtaaagctttgactaaagacattttccgaaacattcccaacttcaggagagttagaggatacttcaacttgtccattttcaagggtcattaatttaataacgttattacggttttcgcgagcaagtagggaagcacggtcaatcgcttgtaaaaatgctctggaattaatgacaagttctgatttagtatcagttggaattaagcgtgatgtatctgggtaactaccttccagtaaacgagaataaaataataaatcttttaatttaaataggatttgattatttgcgagtgtcatttcaatggattcacttgcatcgtctaaaattttatttagttcagctaagctttttcctggaataacaatgttgtattcttcgtcaatatttgtttcaagtggaatttcacgtaatgctagacgatgactatcggttgcaactgcgctaagtttgttatctttaataatccagttaacacctgtaagcactgggcgaacttcgatagcagaaacagcaaaaacagtttgtctaataatgtttttaaggacattaataggaattttaatatttttaccatcagtaacttctggtaatttagggtattccattggatctaagccgtttagtgtaaaggaagcttggccagaactaatgttagtttgataatttgtagtaacttcaatttcgacattttcttcaggtaaacgacgaacaatatcaccgaagtacttggattgaagaacgataccaccaaaactttcaacttctacaattacttcatcattttcgattaatggaataaatgcttcgatggaaatatcagaatcgctaccggttaaagtaacaccttcatcatttacgactatttttatccccgttaaaattggaatcgttgttcttgcagagatggcacgagtaacttcattgactgcttggacaagacgatcacgctcaataacaaatttcatgagtatcccccatttttttatattttgtaaaacctcaaaaacctttaattaattaataaaaaatcgtagtaatagtaataggcactgtggatttgtggataagtatgttttgagccatgcgacataaagttttccacatgttgataacttgtgggtaagtatgttccagttatccacattgtacacaggtctattaaaacatattttgtgactttcttaaatttttttcaatttcagcaaggtcatttttcaacacttgatcggtttttagtagttgcgatattttttcatgtgcatggatgacggttgtatgatctcgtccaccaaattcatcaccgatttttggtaatgaggcatctgtaagctctcttgaaagatacattgcgatttggcgcgggaatgcaatacttttcgtccgtttttttgctttaaaatcttccaaacgaacgtggaaatattcgcccactgtttcttgaatcccactaatcgtaataacttgtgatttagaagaggggataatatcttttaaagcctcagccgcaagaccagctgttatatctttattaacgagggaagaataagcaactactcgaatgagtgcgccttctagctcgcgaatattcgaatcaatttggtttgcaatataaagcatgacttcatttggaatatcaagtccgtctgcttttgcttttttacgtaaaatggcgatccgtgtttctaagtctggtggcgtaatatcagtaattaagccccattcaaagcgggatctaagccgatcttccagtgtaggaatttcttttggtggtcggtcactggaaataataatttgtttttgttcatcataaagcgtattaaatgtatggaaaaattcctcttgcgttccttctttaccggctaaaaattgaatatcatcaataagtaagacgtcaacattccggtattttgtacggaattcttcggttttattatctcggatggagctaataaactcattagtgaatttttcgctggaaaggtacattactttggcattatctttatgttgttgaacgtaatggccaactgcgtgcattaaatgtgttttaccaaggccaactccgccataaatgaaaagcggattatacgctttcgctggtgcttcggctactgcaagtgatgctgcgtgggcaaatctgttccctgaaccaatgacaaatgtatcaaaaacataacgcggattaagcatatgttttccaatttcaataccatcttcatctaatgctggatttggtttaatcacagtgtattcaaagttttcttcctgctcaccatcaataaagcggacatcaaataagcgaccagttatttcttgcaaaatgttagcgataaattgtgtgtagctcttctctaaccaatcgcgtacaaaattattgggcgctgaaataataaacgtgttaccttcaagtgaatgagcggttgttgatttcatccatgtatcggaactaggtttactcatatttttttagacgatttgcagtgtttcctgccagatgtcttcaattgattgcactagtaaccccccttttttgtgtaatgcaaatggatgctctaaagttatccacagatagaaaaagccatggataaggttatccaaacactgctaaaaaattatccacaaagtgaaaatgtattgtggataactttatttttccccagctatatttctattcgacaggaattataatatcagaaaatcactctgatagcaaggacttacaaaatctatccacaaaactgtccagatgtgaaaaacggttgtccacagccagttaacttgtgtataacttgtgtgtaaagaaatctgtaacgaaattgttagaattaatcttccacaagtcaatgtgtgtaaataaccactaattgtgtataagtttaaacttaaataaaaggttatccacaataaaaagccgttattaactacttatccacactttctgggaaaggatttcattgcgacaatgtgttaaactatttagcagaataccaaaaaaaagacaaaagatgaggttgtgaaaaatgatatttcaacggcttttgaaaacaagagatacagagttttaccgagttatacaaaacgggaacattgaagacgtgtttggttatttacttattcacgacaaacgggaaccagcagaaattgatgattttaaagtatttgcgaaaagtaatataaataaagaagctttttccgtaaatattaaaaaaaatcatgtttacacgatgttttttcactttactgatttagaagaagagcaggaaattccgaaatttaccaaagtaattcgttttatagaaggacttctatcttttcagcctgaaacgagccattatgtcgataattatttaatagaggaaaaactaatttttgaatatcctgctgaatttgagaaaattggtgagtttgcgcgatatttagtagaggtttctggacgtaaaatagctattccggatactactagagaaaaatatatctatttgacacaataaatttagaaaaatggtttttctctctataaaaatatgatatgatagtgaacggagtctaaatagaaattcgtctaaatagtattgacaaaaatgaccagttcacgtacaatatctaagactgtctaatagataaattcgattggaccctttcatgggaggtgtaattaatgaaaagaacatatcaaccaagtaaacgtaaaagaaaaaaagtgcatggtttccgtacgcgtatgagtactaaaaacggacgtagagttttagcaagtcgtcgtcgtaaaggaagaaaagttttatctgcgtagaccactgaaaacgactcagtggttttttttttgaaaaatctctgagtcaaacggccttatactaagatatgtaagaagatggagaatgtatgaaaaaaaaatatagaattaaaaaaaatgacgatttccaaaaagtattccgaagaggaaaatcttttgctaaccgtcaatttgttgtttatactttaaagcaagaagaagcaagtcattttcgaattggtttatccgttagtaaaaaaattggaaacgctgtctgccgaaatagaatcaaacgatacataagacaatctttccatgagctagaaagccaaatcaatcctgaaaatgaatatattatcatcgccagaaaaccggcggccaatatggattttcatgaagttaagaaaagtttgattcatgttttaaaagtagggcgtgttttaaaacaaaaaccaaacaattcaaaatgagtggaaatttgaaaaaggcgaaattggaggttacatcaatttgaagaagaaaaagcgattcaaacagaagttgctcatcgcaagtcttgtaatcggattagtagctgtactttcgggttgtggctattcaactgatccaattacaaaagattcaactggattttggagtcactacatcgtgtttccgttatcttgggttattacatggttttccgatttattcgggggaaattatgcagtcggaattattgtcgttacaattttaattcgactactaattatgcctttaatgatcaaacagctgaaaagccaaaaagctatgaccagcttacaaccgaaaatcaaagaactacaagaaaaatactcgtctaaagataatgaaacaaaacaaaaattacaacaagaaacaatgcgcctatatcaagaaaatagtgtaaatccaatgatgggttgtttaccattattgatacaaatgcctattttactaggattttaccaagcgattagtagaactgctgaaattaaaacagatacattcttatggatgcaactaggaaatccggatccatattatatcttgccaatcgtagcagcactaacaacattcttatcatcaaaaatttctatgatggggcaaacacagcaaaataaatcaatggcgatgattgtttatatcatgccagtaatgattctatttatgggtatcacattaccttctgcacttgctctatactggattatcggtaacattttcaccgtattccaaacacttttaataaataatccttttaaaaacaaacgtgaacaggaggcgctggcggctgctcaacttgaagaagaacgtttgaagaaaaaagcagctaacatgaaagcttccaaaaaaggaggtaagaaaagaaagtgagagatataactgcgcaaggctcaaatgttgaagaggcaatccaaaatgcattagcgactttagaaacaacacgcgacaaggtcgaagtagaagttctagacgaaggtaaaaaaggtattttcggaattggttcaagactagctatggtaaaagtaattgaaaaagaagatggtatccaagtagcgattgattatcttttagatgttgctaccaagatgggtgcagtaatcacgattgatgtagaagaagtaggtaaagacgtgaagttgcaaattaaaggtgaaagtctaggaatgctaattggcaaacatggacaaactcttaatgcacttcaatacttaacacaattaattgctaataaaacaacgagccaatacaaaaacattattgttaatgtaggggactatcgtgaaagacgtcatgaaacgttagtgcttttagcaaataaaatggcagataaagctcttaaaacgaagcgcgctgttcatttagaaccaatgccttcatttgaaagaaaaattattcatgctattttaagcgagaatgaacaaattgaaacgcattctgaaggacgcgatccttatcgttatattgtgattaagccagtgaaaaaataaaactaagactgaggtttttaggaatctcagtcttttttttaggaggagacttaaatggcgatttataaggattcagttaatgaaatgtggcagaaataccgagcagaaaacccgacaatctctaataagtttgaagcttgggcgttcggaaattctcctagtatggcggacgaacttggtaaacttgttatgaatggaattaaaacagggactagcagcttgttttattggtatgatcagggcttggaaccaatgccttcagttggttcgcacgtcgttcttttagatggtgaagaagaagcgatgggtattattaagttaataggagtcaagattatgccttttaatgaagtacctgaaacatttgcttatttggaaggagaaggtgacagatcgctagaatattggcgtaaagtacatacttcctttttcacgaatgaatgcgacgagcttggaattccatttgaagaagatgctttggtggtttgtgaagagtttgaggttgtttataaatagaatgtttcacgtgaaacatttataagagtactgcgactaatgcagtactcttattttttattgcgcacttcgttgggtaaaagattaaatgtttttttgtataaggagtaaaagtaagtcttgttactaaagccaactttttcaataatcaactcgattggagtggaagtggtttcgattaaaagatttgctgcgagcattttttgtttattgactagttcggtaaaagtgaaattggtattttttttaataaagttactgagataatttttattgtaacctaatgtatccgcggcacttgttagtgtgattgtccgatagttagattctatcagcttgatgacttcgagcatggtggaagtggtgcttgattgtgcgctggtaagatcatcagctaagtatgtatcgcatttacggactaattcagtgaataggattggtaaatagagagtgataattcgcgatgaaaattcttcttctaaaaaatattccgtgataatttggtttaaaaattgttggatatgcggaatttgcgcactttgaaaaataatatatttctttaaagattgctcgcttacgctggaatgaagaagaaaatcgaatagaaggctgttttttttcttaatactcgttagccattctaggctgatttgttggtcacgaaaaaggatattgatgagaatgtctttttcgcctgttgctttgatggaatgatggcaggcgctgtctaaaagtaaaagttctccttcatgtaaagtttctttatttccttcaataacttgttcggagcttcctgaatacatgtaatttagttcaagaaattgatgtgtatgataagggtagtccgcaaatcggttgtgtttgcttatataaatgtctttgtttttgaagaaataatcgtttaataattccatgctgccgttctcttttaaaaaggatccattgggtaaatcgggaacaaaagtgccagtgcttttttggattttttcttttgaatttagacgaaataattttttattaagcgcttccatttcacaatctccttctgtaaatttgatactttaattataagcacaggatattgtaaagcgcaatcattaattgtttaatataaagtaagcgcttaactaaaataagtaggagggttaaaagaatggctggatcgagtacaagtaaaaaaggaacgatagcggtatctttgacgaactatttagattctggatgtattgtagcgggagcaagtggactaactttgtgggcaacacaattcggacttagcagttttgcagtgggattacttggggcggtgagcgcaaatgcgtttggttctgcaattggcgcacttattggtggtcatttagcagataaatatggacggaaatttatttatacgtataacatgttggtatatatgcttggggttacaatcattatgtttgcgatgaacttcccaatgctattaattggatttttagttacaggtctttctgttggggctggagttccggcttcatggacatatatttctgaaatggcggaccctagtataagagctagaaatattggtatatctcaatttgcttggtcatgtgggccagcaattatctttactttaggaattattgtatctccacttggacttttaggtaaccgcttacttttcttatctttattgattgtagcgtttgtggcttggcagttgcaacgtaaattagaggagtcgaaggactgggaagcggagcaagtgaaaatgaaagaaagtggtaatcgtttggaacatccttttaaaacagcattttctagtatggtaaatgtaaaatcagtacttttcttagtgggtgtgtacttgttttggaatttagtagcaggtgcaatgggattctttatgccgtttgtatatgaaacggtgggtggtctttctaatacacaagcgaatttattgcaagctgtattatggatactcacagcagcttctacatactttggctttgctaaatttggtgatcgagtaagtcatcgtgggttgttttttgtaggggctttaatggcagttgcctcttgggttgtacttacttttgttggaatgtcttgggttggcttatggacatttgttattttatggggtatttcagcagggattggtgcacaagctttttacgcactttggtcaacagaactttttccaacaaaatatcgtggtggggttcaaggtgtgatgtttttcttagttcgtggtagtacaggtgtctggtcgattgtgttcccagtgatcttggcgaatcttggctttactgtggcgggtacaatcatgattggtttacttacagtgtcgcttttaattggtgtaatttgggcgccgaaaacacgtggcagatcacttgatgatattacgaaggaacgttacggaaatacaattgattaaagaaaaggagctagaccagtgaaacattatgttgcagtagatattggtgcatcaagtggtcgattaattctaggaaaattggtgaatgaaaaattacaattagaagaaatccaccgttttaaaaatggctttacgtaccgagatgggcacgaacgctgggaaattgatcaattgatgcaggaaatttttattggcttggaaaaagtaaaacaactggggatttcggaatgtgtgcttggaattgatacgtggggcgttgactatgttttgataggtgcttccggagaaaagttggcagacccaattagttaccgtgataaacgaactttaaatgcggtgcagaatttaacgagtgagtatccacgagaatatatttataaaaaaacaggtattcagtttatggaattaaatactctataccagctgtacgtggaagagcggaatttactagaacgagcggagaaaattttgttgattcctgactatattggttatgtgctcacgggagttaaggtggcagaaacaacaaattcatcgactactcaaatgcttaatttgcgagaacaattatttgataaggatttactttcgcatttgaacattgatgtggaaaaatttgcaccactgacggatgcagggacgtatttaggtaaagtaaaagcggagtggctagaggagtacgatattcctaattgtgatgtagtgacagtggcaacacatgatacagcttcggcagtggtgggaactccggcagaaggagaaaactgggcattcttgagtagcgggacatggtcgctaatagggatggagctaatcgcgccaattaataacgaagcagcttttaaagaaaattacacgaacgaatggggcgcatatggaacttatcgctttttaaaaaacattatgggactttggattgttcaagaaattgcgcgcatggacgactataagcatagttttgctgagatggctgaggaagcgagtaattatccttatttcaagcaaattattaatgtcaatgatgcgcggtttaataacccggaaaacatggtggatgagattaaattgtattgccaagaaactggacaaactgtaccggagacaattggcgaactgacaaattgtgtgtatggaagtctagcactctattatgcactagaattggaaaaaatgactgaaattactggtaagaaaatcgaaaaactttatattgtcggtggtggaagtaatgtagctatgctaaatcaattaacagctaaacttgcagggatagaagtgtttgcgggaccttcagaagcaacggcgattggaaatttagttgtacaaatgattaatcagggtgaaatcgaatccatgcgtgcaggaagaaaaattattcgaaattcatttgaaattggcgaattttcttgtggcgatgtgagatttgaggaaataaaagaaagatttactaaggtacttgaatttaattaggaggcttttagaatgggacaagaaacagaaattagtaaacgatatcaagtggcgaaagaacgttatcaagcaattggagttgatacggaaaaagcacttaaaacactgaaagacattaaaatttcgatgcactgctggcaaggcgatgatgttaaaggtttcttaaatccagacggcgaacttacaggcggaatcatggcgactgggaattatccgggtgctgctcatactcctaagcaattacgccaagatttggaaaaagcttattcacttattcccggaaaacataaacttaacttacacgcaatttacgtagatacagatgaaaaagtagatttaaatgaaattgaacctaaacatttcactccatgggtagaatgggcgaaagagcaaggattggggctcgatttcaatccaactttcttttcacatccaatgtttaaagataattatactttagcttcaccagataaagaagttcgcgatttttggatagagcacgggaaacgctcgcggaaaatttctgagtactttgggaaagaacttggtcaaacaagtattaataatttctgggtgccggatggtataaaagattgcccgattgatcgctacaccccgagaaaacgtttgatggaagctttagatgaagtttttgcagaaaaattagatgaaaaatatacccaagaagctgtagaaagtaagttgtttggcttaggcgcagaggcttatacagttggctcgcatgaattttatatgggttacggaattacgcgggacaaattgatttgcttggatgcgggacatttccatccaactgaagttatttctaataaattgtcttctttagcacttttcagtaaaggtgtaatgttacatgtgagccgtccagtccgctgggatagtgaccatgtggtgattatggatgatgaattaattgaaattggtcgcgaattagtgcgcaatgatttactcggaattacaaatattggtcttgatttcttcgacgcaacaatcaaccgaattgctgcatgggttgttgggactagaaatacgcaaaaatcattacttaaagcccttttagaacctacagctgatttgaaaaaaatggaactggaaaatgactttacatctcgtatggcaattacagaagaattaaaagacttcccatttggcgatgtatggaactacttctgtgaaattaatggtgtcccagttggtcttgactggttgaaggaagtaaaagcttatgagaaagatgtattactaaaaagataggagatattgacgatgacaaaggatatacttgatgctgattttattaaggaaatggcaaaaactacttcaaatttataccggttaggctgggatgaaagaaacggtggcaatatcacttatttgttggatgaaaaagaagttgtggaatatttagatgtaaaacaaattatccgcacaattccaatggactttgacggtgaaaagcttgctggtaaatatttcttggtgactggttcgggtaaatattttaaaaatgttgaagaagctccagctgttaatttaggtgtaattcaagtaagtgaagatgggaaagcagttcatttgctgtggggctacacagacggcggactaccaacaagcgaacttccagcgcattttatgagtcacattgcaagactttctgttgatccggaaaaccgcgttgttatgcattgtcacgctactcatttgctcgcgatgacatttacacatgagctgactgaacgagcatttacaagaactttatggcaaatgtgtacagaatgtttagtcgtttttccagaaggtgttgggattattccttggctggttcctggtacgaatgacattggaaaagctacatcagaaaaaatgaaggaaaatcgtttaatcgtttggcctcatcacgggatttatggtgcgggacaatcaatggatgaaacatttggattaattgaaaccgccgagaaagcagcagaagtttatactattgtgatgtcacaaggcggtattaaacaagcgattacagatgaacaattgaaagcactgggtgaaagatttggcgttgaagcaaaggcaggttatttaaataattaggaggtaagaataatggaacgagtggcatctattatgtatttatatcctggtaatcaagaagaatataaaaaaagacacgacgaactttggccagaaatgaaagaggccttaaaagcgcatggagcagctaattattcgatatttttagaagaaaaaacggatacattatttgcttatgtggaagtcgaggataaagccatttatgacaaaatagcagaaacagaaatttgtcaaaagtggtggaaatatatggctccaatcatgaaatcaaatcctaataatagcccggtcgcggttgatttaaaagaagttttctatttagcataagaaaagagacatgactttaacgcaaagtcatgtctctttttctaaatactttttggtaagcggaatatgagtagaaaacaaactacgagtagaaaaatattaacgtacatactcatttgcaaactgtctgaaaaggcacttgcttttgaggtggctgtagtattaccgagagtgcggaaaaatactgatccgacaacggcaatcccaaaggacgaaccaattcgttgcgctgtattaaacataccactagctccgccacgatcgagcccagtcacggtggaaagggtaaaactatttaatggtgcaatagttaaaccactaccaagccctgcaatgaaaagtggtaggaataagagccaagcagaaaaagcgccatcattgagatgaaaaactatagaaaccgtgccaagaccgacaataacgagcgagaccccaagcattaacagttttcttcctagtagcgggataaatcggtaactattggatgctgccagtacgctacctaatgcaaaggggctaattgcaagtccagataaaatagctgaacgattgaaaccagtttgccaagttagcgatagaacgaagaaaatactagtaaatgcagcaaaatatacgagtgataagagcattcctgagacaaattgattgtttttaagtaagtttggcgcaattaatggttgattgcctttcttttcttggtaaacactccatttataaaggatgatgaagagcggaatagaaagcgccattaaaaggtaatctattggtttgaaatcatttgcaccatttgaaataagtgggaaaagtaatagtaaaagtgcgattgtcagtaagccaactccaggcaaatcaaagctgatttttttcgtggagacggttctcttaggaagataaagcattgctaggacaagtgttactaacacaaaaggtacgttaacgaagaaaactgcgcgccaaccgtttgtagcgccgaacagttcaattaaaagtcctcctgtaagaggtccgatggcagtaccaacaccaataactgaaccaagaatgccgaagattttcccgaggctttttccggaatacatatccataatcgtcgcattgatttgcgggaaaaataacccggcagcaagaccttgtattacccgggaaataattaggctattttccgaacccgctaaaccggcagtaacactcataattagaaatagggtaatcccgataatataaatgtttttccgaccaaatttatccccaagtcgtccagctaaaataagcacaaggccaaatgcaagagcataacctgaaataacccattcaatcgtctcgcttgtcgcatgtagggctgtcgtaatatcaggcaaggccacattaacaattgtcgtatctaataatgaaataaaagctccaagcattattgaaataagtgctaaagttttacgtttatccgtttgttccatgaatcattctcctttttgaagctttttgagatatttttcattataaacctaaacgttactatattaaagaaagagccaatgtttcacgtgaaacattttactttgagggcaagatttgataagctttttttattaataatgcgggggtaaacgtatggaaaatcggaagcaaatgataaaaaccgaacgactttttttaagtgaaatgacgttggctgatacggaaattttatttggatactggtcagatgattcagttactagatatatgaacattgagcctttccaaagtttacagcctgtagaagaaatgattcggatgctaaggcaactagagatagaaggaaaagcacttagatgtgtaattattttgcaagcaacaggagaaattattggtacatgtggctttaactatattgatcatgaaaatcaccgagcagaaatcgcttatgatttaggaacacgattctggaaacgaggatatgctacagaagctgtaaaagccttgatggagtggggaaaagaatcttttaaattacacaggattgaagcaaaagtagacccgagaaatgaggcgtcaattactttgctagagaagcttggttttttagaagaaggattacttagagattatgaaaaaattggcacggaatatcaaagtttgaagttattttcttggttagatacaggtaaataactacatttaaagagcgctgtatagagctctttttttgtacataagaatgataaatgtgtcgaattttttactaaaaaatggaaagatagtaatcatataagattatttcttgtttattatatttagttattgctaaaataaaaggagctataaaaaatacaaactcaaggagattatccaatgacaaaagaatattattttataaaacctgaattaagctctcctgaaacaaagcaagaaaacatttcttcttggttagatacccaagatacagatttttataatgctcaaattgcccaagaacgggattattgtttttggtgtgatattgtagaaacggctaaaacgaattcacgggaaagttatacttctatggcttatactttgaatgatcctaatatgctcaactccgctgcaaaaaccaattttattttggcagaagatgaagtgttatatatacacactctgtccgtcattcgcgacggcaaagtcattgataaaataaatgatattaatgtgaaagtcttggattatgttcgtgatgaaaatcaagctagttttaatgatgagaaaaaagtaacggttctaattcgtgatttacatttaaatgatattttcttaattgaaacaactattgaacgtaaatatgaagaaagcagcattcgtaaccaatttttccgctggatttattcggctccaaattcatactgggcttacggaaagtatcgttttgaattgaagaacgagacaggacagaatttagaaacgaatttccattatttccgcgatgaagcaggggcaattttagataaagaaaaagttattattgaaaatagccaatcttatacaatcgaaaaagaagactatattggaaatgatccaaaagagtttgaacttacgccatttattgattttgttactgaaaagacctatccagaaattaccaaagcaatcagtgacgtttatcagaaattctatcaagtggatttagccagttttgctggtgatttggtttctgaattagatgcattaccttctttaaaacataaaattaggcatgcgattgattttgttcaaaaagaaatatactatttgtataatgaaacggaaatggatggacatgagcctcaagcggcagaagtaacttatcagacgaaacaaggtgattgcaaggcgaaaacggttcttttaaaagtgattttagattatttagaagtcgattcagagctgattttggttaattatggcagtgatgtctttttaccggtttatacgccgtcaccatttaattttaaccatgcgattttaaaagtaacagatgataatcaagtttattttattgatgccacaatgagtagtgaccaaggttttttagctaaccgccaaagaaatagtttcatgtattatttggaaattaaaccaggaacagaattacaaaagcaagagccttttcaagatagaacgccttctgttgaagaaattttccgatgtgatgttaaaggaaatgaagccgaggttgtttttgaaagaaaattacgcggtggaatggcaaacggatcacgtgaaatgtttaaaaatgaatcaaataaagatattgttaatcgctataacttcgcgatttatagcaatatgactttatataaaaaatatgaagaaaatgagattgataagcactttaataacacgtccattcaaattgtggaagataataaggaaatgaatgagatttcgctagtttataaagcaacaataactgacccatatattgtagaaaacaaaaaacgctttttacatttttggagttggggtaattttattgatgatggcgcggaaaaacatttccataaagatttcccgtattgggttgatcgaaatatcatcaaaatggagattcatttaacgactgaccactcgatagatcagacggattcctacacacgtcaagaatgtgacatcaagtctaagtatttaaatcatcgtgtgacgaagaaaattcacaaaaacggtgcttcgtgttatttagagtatcgtccatatcacaaccttactatttctgggaaagatttagaagaatatattaaagctaataaaaaagttctagatagtaactggggaattggtattgatatcattgaagatggtctgtttaagaaattaggtaagctatttaaataaacgtaaaaaaagcatccctttctataaggggtgcttttttataaatggtcccgactggtctcgaaccagcgacccccaccatgtcaaggtgatactctcccaactgagctacaggaccaagtaaactcagaaaataagcttaatcgtttattttctgaatggattcacgttcaatcatttcggttttaatgatggtcgtttttggtacgtttttatcttggtggattaagcggaataataagttagtcgctttttttcctagtttattaattggtatgtcaatagaagtaagtggcggtgacaagaaagatgatgctactttatcattatagccgatgacagaaaaatctgcaggtatttgtaaatttttatcggctgccattttataaatactaagtacttttaaatcgtcggttgcgaaaactgcggttggtttatcggtgctttccattaggcgtaatgcggctttgtaactgtcttcaatgctataaccgctatcaataatccagtcattgcgaaggtctaattggtggtcaaataggcagcttcgaaaaccagcaaggcgatcaatcgaaacatgataatcaagtggtgcgtggatacaagcaattttcttatgaccttgcttgattaaatgtttagttagagcataactatcaccaaaattgtctgtgtcaacggaataaatatttttgtaatgtccttctacttttccggtaacgacaatggggatattatacgggtctaattgatggaaaaaatcttcatcagccggagaacttagcataattatacctttaatcattttttcttggatttttgagaggcattttttgagttcgtcttcgctgtttttggcggtctgaagaataaggtcgaaattttccaactcagcttgagtggaaatggattgaattatttcggaaaaaaatggatttcctgttgttgtggttgtggagcgatttgagataaccatgatagcatcaaagcctgaagaagtaagtgcgcgagctagtttgcttggctggtagttgagttcatcaatcgcttctaatactttttgtcttgattctttggaaatattagcttgattgtttagtactctggataccgttgattttgaaactcccgcgtgttttgctatgtcataaatggtagctgccaaggtaatcttcctttctctattgtttccggtatcggttccggtcattatcatccatgtttatattactcaattttacgctaaatgtccaactagatgttatataggtataaaaactcaatactgtcaacatgttaggaaattccttttaaattgtgtttgacagaaagcgctttccatactataattctttttgtgggagcgctcccggttaggaggtaaatgatgacgaatttaagaaaacgactttcgcggttatattctgaagatgtagttgagagtttagcaacgagaattgaagcccgggtaaaccaaacgaaacaaagaaagttagtacgaaaagacaaatgggacgagaaagatattgttttaattacatatggagaccaatttaaagaggaatccaaaaaaactttaccaacctttaagaaaatgtatgatcgttatttaaaatcgacttttgaggtagtacatttcctacctttctatccttattcctcggatgatgggttttcggttattgattacaaagcggttaatccggagcttggcgattgggaagatattaaggaaatggaacagtcggcgcgattgatgtttgattttgtttgtaatcatatgtcggcgaaaagtgagtggtttaagagatatttagcgggcgataaggaatttcaaaactttttcgtggaaatggatcccgatactgaccttagttcggttacaagaccacgtgcaacaccagtgctcacgccgtttcaatttgcttctggtaaagagggttatatttggacgacgtttagtgaggatcagattgatttaaactttgcttgtccggaagtgctttacaagatgattgatgttttgatgttctatttagaagaaggtgcggaatatgtgcgacttgatgcggttggctttatgtggaaagtgccgggaacgagctcgattcacttagatgaaacgcatgaaatcgtgaaattatttagagatttagtagatatggcagctccggggacgattattataactgaaaccaacgtgccgcatgttgataatattagttattttggaaatggtgaaaaggaagcgcatatggtttatcaattcccgcttccaccactcgtgctccatgcgatacatcacggaaatgcggaatttttgagcaattgggcgaagaatttagagctcccagaaggcaagcgtacattctttaatttccttgcttcacatgatggaattggcttaaatccagtgcgcggaattattccagaagcggaaattttagcattggtagatgatttggaaaaagaaggagcactcgtttcttataaacaaaatccagatggtactaaaagtccgtatgaaattaatgtgacttacatggatgcgttaagtaaacaagcggatactgatgacttgaggctatcgagatttctcgtcgctcatgcagtattaatgtctatcccaggcgttccggctgtttatgttcaaagtattttaggaagtcgcaatgattattcaggcgtagaaacaacggggcataatcgctctattaatcgaaaaaaatacgacttggcggaaattacagcagagttgaatcaggctgactccttacgaaaagaaacctatgatgcgctaacgaaattaattagcacacgaaaagcggaatcacttttccatccagaaataccgatggaagttttagaatctacggcggaattgtttgttgttaaacgttcatccgacgcggaatcgattatattgattcataatttatcagaaaaagaagtgagttattcactagacagcggtgtttatacaaatctttataagggctccacggtaactgggagcgattccataaagcttagaggctatgaattctgctggctaaaaaccaaaaattacagggaggaacaaaaatgaagaaaaaaagtcttgtattacttgttgttgtgttggttctaagtgcggtattagctgcatgtggagggaaagagtctggtagtaaggaagtaacaattgaatttatgcattcatccgttgaaaaagagcgtttagatgttattaataaattaattgctgattttgaaaaagaaaatccaacaatcaaaatcaaacaaattccagttgaagaagatgcttttaatacaaaagttgtcacacttgctcgttctggtaaacttccagcagttatggaagtaagccaagattttgccaaagtaatggataaagatcagttaattgaccaagatgcagtaaaagcagttatcgactcggttggagaagataaatactatgaaggtgcaacaaacttagtgcgttctgaagatggtaaaagctatatcgcagcaccattaagcggttgggttcaaggtatttggtacaacaaaaaagctttagccgatgctggttttgaagaaccaaaaaactgggcggatattgaaaaagtagcgaaaaaattcacgaataaagctgataaaaaatacggtattgcaattccaacagcagaaagtacgatgagtgagcaagctttctctcaattcgcactttctaacaaagccaatgttttagatgcaaaaggaaatgtaacgattgatacaccagaaatgaaagaggctcttcagtactacaaagatctttcagcgtacacaatgcctggttcaaatgacgtaactgaaattaaagatgcgtttatgaatggtactgttccaatggcaatgtactctacgtatattcttccatctgtatatgaagaaggcgacccatctaacatcggattcgctattccagaagaaaaagaaaaagcagtttatggaacagtttccggattgactatctctgctggtttggatgatgaccaaaagaaagcaacgaagaaatttgttgaatacttgtctcaaccagaaaatatggcaacgtgggtattaatgtctccaggtggcgcacaaccagtaaataaagaagtagtagaacaaaaagcatacaaagaaaatgaagtgattaaatcatttggtgatcttccaaacgaaatcgctgcatctttcaacgacatccaagttttcggacttgttgatggtaaaaacctaacaaaaatgggtgatataactagttcaggtattatcgcacaaatggttaacaacgtaactgttggcggtggggatgtttcagcggacttaaaagcagcacagaaaaaggcagaagaaggtaaataatcaaatagcggggaggtgagtctccccgtctttttatacagtttagcacgtcgctttttgatttaaggaggcattatgaaaacaaaagtatataaaaggtccgactttaagttagcaatgattttacttgcgccaagttttgttttactggcagcacttgtgttatatccgatgatttcaaatatccagattagttttttggatatgccgctaaatccgaatattaaatcggtctttatcggtttacaaaactatatagatattttgaaggatccagagttttataaatcactaggtcttaccgtggcttatacagcgcttgtagtaattgggagtacggggatggggctacttgtggcgattttctttaaccgcgaatttcgttttagaagaacggctcggtcgcttattattttgtcgtacgtaacaccatctatttctcttatttttgcatggaagtatatgtttaataatggttatggtgtgattaattttatgactgtagatgtgcttcatatgtttaaagaagcgccactatggtttgataatccagtttctagtttctttttagtaaccttttttgcgatatggcgttatttcccgtatgcatttatttcgtttttggcgattttgcaaacggtcgataagtcgctttatgaggcggctgatatggacggagcgaacatttgggataaattcaaaattgttactttgccagcgattatgccggtacttgcaacagttattacgcttcgtgcgatttggatgttctatatgttcaccgatgtatacttactcacgaataaagtaaatatccttggagtttatttatataaaacagcattcgcattcaatgatttaggaaaagcagcagcgatttctgtcatattatttgtcattatttttgttgtgattatttttgcaagaaagcgggtggatttgaatggcggtaagtagtaaaaagtcaaaaagaacaaagaaaatcgcgttttatgtgacgatggttgcatttttatgtataacattgttcccatttgcgattatgttaatgacttcatttaagagcagcaaagaagccatttctacgcatccaacatttttcccgaaagatttcactttccagcattatatcgatatttttaatccagatatttttccgtttttaacgtattttaaaaatagtttggttgtttcggtttttgcggcaggaattgcggtcgttttggggattttaggagcttatgcgttgtctaaattacggtttaaagggcgaatgacgattaacgcgagtttttacacggtttatatgttctccggaattttgttaattgttccgttgtttaaaataatttcgagtttggggttatatgatacagaaacagctttaattatcacgatggttgtacaaacactaccaactgcggtatttatgctaaaaagttatttcgacacgattccaactgatattgaagaagccgcaatgatggatgggctaaatcgcttccagattattttacgaattattgttccgcttgcgatttcaggtattgtatcagtgtttgtatattgcttcatggtagcttggaatgattatttgtttgcgtcgattttcctatctagctcagagaaattcacgttaccaattggtttaaatacactatttagtacaccagattatatttggggtagaatgatggcggcctcgctagttacggcgcttccggtcgttattatgtacgcaatttcagaacgatttatcaaaggaaacttaacagacggtggagttaaaggataagaaaggaagttttttaaaatgaaaaaattagttgcgactgcccctcgtgtggcggaattagtagaatatcatgatcgtgaagttgtagaagatgaagtaaaaattaaagtacagttcgcttctccaaaacatggaacagaagtagttgattttagaggaattagtccttttattgatgaagaattttctccagaatggaatttatttgtttcacgtgaaacaaatagtgcgcgaggcattgtgtttggcgagtttcagctaggcaatatggtcgttggtgaagtagtcgaatgtggaagcaaagtgacggaatatgcacttggagacattgtttgttcttatggaccgattatggaaactgttattgtgaaagctgtcgataattataaactacgtaaattgccaaaaggtgctaattggaaaaatgcggtttgctatgatccggctcaatttgcgatgagtggcgtgcgagatgcacatgttcgtgcgggggattacgttgtcgttgtcggacttggcgcgattggccaaattgcgattcaactggcgaaaaaagctggtgctagtgttgttatcggggtggatcctcttagtcatcgtcgtgaaattgctgaaaaacacggagcagatgctacttttgatccgattacgacagatgttggtttagaagtaaaacgtctgactggtaagctgggtgcggattcgattattgaaacaagcgggaatgcggcggcacttcaagcagcacttcgcggaatagcttacggtggaacaatttcttatgtagccttcgcgaaacctttcccagaaggatttaaccttggtcgggaagctcatttcaacaatgcgaaaatcgtcttttcacgtgcggctagtgaaccaaatccggattatccgcgctgggatcgtaagcgtatcgaggaaacgtgttgggaactactgatgaacggttacttggattgtacggacatcattgatccagttgttccattcgctgattctgctgaaagttatatgaaatatgtcgaccaacaacctgatttaagtattaaaatggggattaccctttaaggagcgataataatgaaattaggcacacaaaaccaagcatttttcccggaaaatatagaagaaaaatttgcttatgtaaaagaaatgggctttgaaggttttgaaattgatggtaaattgcttgttgagaatttggatgaagtgaagagtgctatcaagaaaacggggctacctgttagtactgcatgtggcggttatgacggttggattggtgacttcattgaagagcgcagactgaatggtttagaagaaattaaggcaattttagaagctttagcagaagttggcgggcaagggattgttgttccagcggcgtggggaatgttcacttatcgtcttccaccaatggtttcgccgcgtagccaagccggagatttcaaagcagtgagcgagtcgttaatttatttggataaaattgctggtgaaactgggacgaaggtttatcttgagccacttaacagataccaagatcacatgattaatttgctaagtgatgcgcagaaatatattgatgaaaatgaacttaaaaatgtagaaattatcgctgacttctatcatatgaatattgaagaagatagcattccaactgcgcttgaagagcataaagattccatcggtcatattcatgttgctgacaatcatcgctatcaaccaggaagcggtagccttgattttaaaacaagttttgatcaactgaaaaagaatggttacaacggatttttaacttttgaatgtcgtgttcgtagtgagaatccagaacaagcttatagagatgcgttggcacatttaaaaagctgtttaatttaaaatagaaaatccgtcccaatcaaagcggacggatttttctaaaaggagtttcggatatgaagaaaagagttgcaatcataggagcaggacaagtcgctgagaaggttcatgcggcatattataagacaagaaatgagctcgaacttgtggcagtatgtgatcctagtatggaacgaggcgaagagtttcgttcaaacaatggttttttgaagcattatgccacggcggaggaaatgtttgctacagaaaaaattgatatagttagtatttgcacgcctaatcggtttcattttgataatgtgatgttgtctcttaggcacggggctgcggttatgtgtgaaaaaccacccgcaatgagtgcagcagaagcgaaggcgatgtgggatcttgctaaggaaaaagaagctattttagcgtatgattttcatcatcgtttttctagtgaagcacagtttttaaagaaaaattcggcgcttttaggagagatttattgtgtgaaagcaactgcgcttcgtcgttctggtgtgccaggttggggaacttttacgaataaagaaatgcaaggcggcggtccgttgattgatatgggaattcatatgctcgacgcggcgatgtttgtccttggctttccaaaagtgaagaaagttacggcaaaaagttttcaaaaaatcggaacaaagaaaagcgcgggaacattcgggtcatgggatccagaaaaatatacagtcgaggatgctttatttggttttattgaactggaaaatggcggattaattgagctggatacttcttttgcgttacatattaaacccgagagcgtattaaatgtcgacttttttggggatttagctggtggaagtttatatccggctgaaatttatacggataacgcaggggaatttcagttgttggaaagcttaggtcaactggaggaaaataaacacgataacagcatgaaagcatttgttgatagcgttcttggcgagggggatttagaacttgctggcgctgaacaaggttacagaatacaaaaaatcgttgaaagtttatacgaatcggcagaaaaaggtgagagtgtttttttatgaggaaaataatcgagaaggaatttgcattaaattatctaaataaatatgggagccaaatgactgtcggaaacggctatttgggtgtgcgcggtgctcttgaagaagaatatccggagcaagttcgtggtatgtatgtggcaggaatttacaatcgtccgagcggttcagtgagttcggaactagtgaatttgccggatgtgacacggttccaagtgacgcttgacggggaagttttttcgatgcaagcagggaaagtccatgggtatgaacgatttttagatatgaatacaggagaattagttaggaaaattatttgggaaaacagcgccggcgacaagtaccaactaaatttttatcgatttgcttcaaaggttgtgaaacatgttattgcggcaagagtggagataacgcctttaaatggatgtgcgaaagtgaaaataaaaacaggtattgatgcacaacaaaccaattttggaacgcaacagttggcagaatctagtttacggatttttgatgaagagctgatggttggtgaatatgaaacgattgaaagcaaacagcgaattacagtggcaacaaaagtcagtcaaaaaggggttttcactgctaaaaatcgccaattaatgactgaagttgagcaagaaatcgcagccaaccaaacattcgctttggagaaaataagcctggttaaaacatctcttgatgaggtggacgtggagtttccaaacgagacttatgctgaactgaaagcaaattcggaaaaagcttgggcagatttttgggagcatgcgggtgttcgcgttgagagcacgaatgattttgatcagtttgcgctagattttgcgtgctatcatttagaaattatgacgccgaaagatgattttcgttgtagtgttggtgcgaaagggctgaccggggaaggttacaaaggacacgttttttgggatacggaaattttcattatgccatttttcctttataataagccggaaattgccaaacaactgctagaatatcgttatcttcatttgaaagaagcgaaagaaaaagcattgaaaaatggatataatggggcgctttacccgtgggaaagtgccttctctggtgaggaagaaacgccggaatttgcagcgattaacattcggactggaacacggcaaaaagtagcttctgccatctcagagcatcatttagtggcggatattgcttatgccgtttgtgaatatgaagctgccacaggtgatgctcagtttatgagtgactgtggtgctgaactgctcctcgaaacagcagagttttggataagtcgagcaactaaccgcaacggtcgactggaaattctcgatgtgattgggccggatgaatatacagagcacatcgataataatacttacaccaactacatggcgcactataatgtgaaaatggcgctggaatggaaccgcgataatgaagcttttcagtcacgtgcgaaagcgtttcttaaaaacttatatttaccggtcgcaaatgaaaaaggtttaattccgcaagatgatacttttttacaaaaagattggataaatttagataaatataaggctgcgcaaggaacacaagggattttactagattattcgcgacaagaagtgaatgaattacagattttaaagcaagctgatttagtgatgttattttatttgtttcctcagatgtttccgccagaaactgtgaagaaaaacctagattattatgaaaaacgaaccattcacgattcatctttaagtaaagcgattcatgccattgtggaaaatcgtacgggaaaccgcgagcaagcctatcaatttttccaagaagcgtgtttaattgatcttggggacgaaccacattcatcagatgacgggcttcatgcggcttcactgggggcaatttggctggcagtggtttttgggtttgcaggcattgatactagcggagaattattagaaatagcgccagatttgccagatgcttggcgatttgtgaaatttgaattcatgtggaaaggtgaaacaattctagtggaaatagcgccaaacacgttacaactttcaaaaaacacaaaaagcatgctagaattagttatctacggagaaaaacagcaattaacggatacattaacgattaagatggaacaaaaggatgtgtctttatgaaaattgtcattgcaccggattcatttaaagaaagtttgacggcgcacgaggtggcagagtatattaaagagggctttcaagaagtttatccgcatgcagactaccagttacttccagttggagatgggggcgagggtacgcttgatgttttaagtagagccgtggatgcgaaaacgacgaaaatcaatgtttctggtccgtttggcgagcctgtttcagcaaaagttgcctttacagagggcaataaaaaagcgctgatcgaaatggctgaggtttgcggtttgcatctagttccagcaactaaacgtgatccacttcaagtgagcacaaaaggggtgggcgaactaattttgcacgtaatgaaaaaaggtgcgaccgaggttatcattggcataggtggaagcgcttcaaatgatggcggaataggcatggctagcgcgcttggctatgaatttttagatttagaaaacaatgtcgtaaatccaatcggcgccaatttagctagcatcgcaaccatccgctctgaaaatgttcctactgagctcaaaaacatcacgataaatatagtaaccgacgttgaaaatccgctttgtggaaaagaaggcgcatcctatgtattcggcccacaaaaaggattagctgccactgatctcgcgagcgcagacgaggcaatgcgtcatttttatcagctggccaatccagcgatgataacaatggcacgagctggtgctgggggaggaattggcgctggacttgcaacatttgcagaggcgaatttgctgtctggcattgattttgtaatcgaggcgcttcaaattaaagcagtttgcaaagatgccgatttagtcatcgttggtgaaggaaaaatggacggacaaactgctcaaggaaaagcaccagtcggcgtggcgaaagaagtacctgatggaacacccgtttttgcaatttgtggaagcgtaggagagggtcttgaagctgtctatacggccggaatccacgcggtatttccctcaattgcgagtccaacaactttagaaaaaatacttaaagaaaccccaaataatctaagaagaaccgcacgaaacgttgcggcagtttggaaaggacgagtagaatgacaacagcattaaaaggagtagtattcgatttagatggtgtcatcacagatacagcgcattaccattacttagcttggaaaaaaacagcagagagcattggaattgaattcgatgaagcatttaatgagaatttaaaaggagtgagtagaattgactccctacttcttattttaaagaaagacggccgcgaaaatgacttcacacaagaacaaatcgaagcacttgcagcagataaaaatgaattctatgtgagcttgctcgaagaaattacgccggcagatgttttaccaggaattaaagaacttatagtagctcttaaaaagcaaaatcttaaatgcgcgattgcatctgtttcaaaaaatgctcgtacggtattgagtgcgcttgaaatggaacaagaatttgattacattgttgatgctgctaaaattactaaatcaaagcctgatccagaaatttttgtggaagcatgtcgcggtttaggcttagaaccatcagaagtagttggaattgaagatgcccaagctggaattgaagcaattaacgcagctggaattataagcgtgggtgttggttctggacttcgtgatgcggatatgacagtgaaaaatactggtttgctagatttacgtattttagagatattacatagcaaataaaatgtttcacgtgaaacaaaagtgtcaaaaagtgaacaaaaagcaagatatattgctattctaaaaccctttgcttgaccacgatacaactttggaatattctgaatgtgaggtggatatgtatggcgattatttttgcaaaagaagagaacttggaagagattattagtagccatcctaaaatattacttaatttttgggcagaatggtgtgctccgtgtcgctgtttctggccaacgcttgagcaattctctgaggtggaagaaggtaatgtccaagttgtgaaaattaatgtagataaacaacgtgcattagctcaaaagtttgatgtaaaaggaataccaaattcgcttgttcttgttgatggagaaattaaaggcgcaattgctggtattgtcagttgtgatgaacttagaagtaggtttaatagtctagcaaaataaaaattccgcgatccaatttaatggtcgcggaattttttgtttcacgtgaaacatttattatttgaaaacgcggaaacggtcagcgtcatcgatgaattctttttcgccagcttcttgaacgatgttaccaaacggcatttgagcgcgtaagttccagcttgcaggaatattccattcagctttaacagcatcgtcaattagtgggttgtaatgttgtagagatgcgccaattccagcgtttgcaagagcaacccatactgaatgttgtgcaatacctgaagattgttcagaccatacagggaaattatctgcatatagtgcaaagttttcttgtagaccttcaataacagcagtatcttcaaagaaaagaactgttccgtatccagcgcggaaagaaccaactttttcttcagtagctgcaaagttttcagcaggtacgatagcgcgcaatgtgtcttctacgatattccaaagtttatcatggttttctcctaaaagaataacagcgcgagaactttgagagttgaaagaagatgggctgtatttaactgcgtctttaatgatttcttcaattttggaatcctctacggaaacgtttttatctagtgcataaatggaacgacgaactttaatagaatctaaaaatgtattagtcataataataaaactcctttgttaatgttatttacttacataagtatagcaactatttattaatttgcaagtgtttttgtcggaaaaagattatgtaagcgctaaaccgattacggctcttataaaaaaactttttaagtaaaaaacttgcttttaagaacgtttgttcgtataatgaaattaagaggtgataattatggttacggcaattcagaaagagcaagtgcggacagagaagaatgctgcttttttaacgagtcggccagaagtggattatttagaacgcgagagcttctttatcacattaaaagacgccatgaagcgagaatgggtcgttcgactaaagttttttcaagaagcagatgtttcttctttacgtctagcatcatttgaatatccttccgcctttcttgggctaggagaaattgaaaaacaagatttggtgccacttgaaatcgacatgttaacggaagaagttatttttacagatattgttggacatgaatatgtaattgaatttagagatattatagatgttgaattattatagaagcagtcgtttattcggctgttttttcttgtcaaaaaaggaatccatatgtataatggttgttatgacaattattgttacgacaatagaaaagaggttggaaatgcgcggatattatgatgaaatctcattcgatgtaaatacgactgccaagaaaatgcacttgtttttgatgcgttctattgcaagctatgatgtaacgcctgagcagtggtcagttttggaggggattgaggccaacgaaccgatttctcaaaaagaaattgcgctttggacaaaaaaagacacgcccacagtgaaccggattgtcgacgttttgcttcgaaaagagcttattgtgagggaaattagcacagaagatagacgaatttcgcttttgtcattaacggataaagggcgaaaagaaacgacagaacttcgggatattgtggaggcgagttgtgaaaaaatgtttgctggggttactcgcacggatttggagcaattcacggctattttaaagaacatttctactaatatagagtaaagaggggtaaattttggaaaataagacaagactttggacgaaggactacgtatttttattattaggcagtgtgcttttatatattgggtttatggtgtttatgccgacgttaccagctcgaattattgaacttggcggaacacaaatggaagctagtttagcggtagggctattttcaattgtcgccttacttatgcgggcgattgctggaagttggaacgataaatttggacctaaagtattaattattgcaggttttttgattttaattttaacgactgtgaacttttattggtcgacggcggttgcggctttgcttatattacggctttttcacggggctggctgggggtatcggcacgacgtcaattgcgacaggggtatctaaattagtaccgccgagcagaacgggagaaggaattggcttttatgggcttacgactgcgcttggaatgtcactagcgccaattattgctattttaatcatgaattatttttcttttgatgttttagtgactttttcgcttgttttgatggtatttattttacttttaatgacacaagtgaagattccaaaatcagaaaagatcgtccatcaaaaaatgaaattgttcgagaaaacagcgctacttccggcagggctatgcttgctaatggctattccgcttggtggtattcagacgtttatgatggtatacgggacggaaattgggatttcgacaacttgggtttattttatcgggcaagccattatggtgcttattagtcggttgtttgctgggcgtctttatgatacaaaaggacatcgttttgttattattccgggtgcgctatccatgattattggaatattaattctttcttttgcaaccggggcaatcagcttatttgttgcatcattgttttttggactaggatatgggatggcacaaccggcactccaagcacttgctgttgaccgagctgcgccacataacaaaggaactgcgaacggtacttttctttcaggaatggacattgggatggctgttggtagttttggtttaagtattgtggcgacttactacaattatgctattatgtaccgcacagcaattattgcgcttgtcatattttttgtggtttattggttaactttagggcgaaaagtgaaaaatagctgacatctcttgtgaagctgttttcaaattttgtatgtgcgagaatcgctttaaatagcggattctcgcgcttttttaatgtcagaatgtttaaacatcacatttatttggagatttagtataaattttctgaaaaacagctctatttctgctataatatacaaaagtacaaaaggcagtgtttacttttaagcgctgaaaaatccgaatattgtgtagaatatcacaggttcggcttttttatttcttaagaacagaacttcgaaaagcataagtgtaacgaggaaggctcatatccggccagtagttatgaattactggtgaaaaatttttgtaagtaattggggaaatttgatgacaggagagatgttgagtggaacgtgtttataatttttcggcaggtccggcagttttaccagtaccggtacttgaaaaggttcaaagggagctactctcttataatggttcaggaatgtcagtaatggagctgagtcataggtcagaattatttcaaaacatcatagacgatgcggagagtttaattcgagaattgatggggattccagaaaattacaaagtactatttttgcaaggtggcgcgagtttgcagtttgatatggtgccgatgaatcttgcaaatggtaaaaaagcagtctatgtaaacactggatcttgggcgaagaaagcaatttctgaagctaaaaaaattcagggtgttgaggtggaagtaattgcctcatcggaagaccgtaatttcagctatattcctgaaattcctacagtttcaactgatgctgcttacttacatgtaacaacaaataatacaatcgaaggaacagcaatgtttgatgtgccagactcagctgtcccggtcgttgcagatatgtcctctaatattttatcaagcgtttatgatgtgaaaaaattcggtttgatttatgcaggagcgcaaaagaacattggtcctgctgggttaacgcttgtcatcgtgcgtgaagatttaatcgggcaagtagagggacttccttctatgttagattttaaagtacaggccgaaaatggttccatgtacaacacaccaccaacttttgctgtttacgtagcaaaattagtattcgaatggattaaagaacaaggtggcgttgctggaattgaagcgttaaatcgcaaaaaagcggcattattatatgattatattgaacaatcggatttcttttcttcaccggtcgagccttctgcaagatcgctcacgaatattccttttgtgacgaattctgcagagtttgataaagcttttgttaaagaagctgaagcaaatggttttaaaaacttgaaaggacatcgctccgtgggcggtatgcgagcaagtctttacaacgcatttccaattgaaggggtagaagcactaatcgcctttatggaaaaatttgccaatgcaagaaaagggggagaagtacgtgtttaatatccaaacgtttaatgctatcgctaaagaaggcttaaagacatttgatcttgagaaatatgtgatcgatgcgaaccagccagcagacgggattttactacggagttataacttacacgattttgactttccagaaacagtgaaggcagttgctagagctggtgcgggagttaataatatcccagtagaaaattgttctgaaaaaggtattgttgtattcaatacgcctggggcgaatgccaatgctgtaaaggaactggttcttgcaagtctattcgtttcggcgcgtccaattttggaaggtacggaatgggtgaaagaactaccggccgaagatgatgtggaacaaaaagttgaagctgggaagaaagctttcgcgggaacagaacttgctggcaaaaaacttggaattattggcctaggtgcaattggagctttagtggcaaatgatgcactatcgcttgggatggatgtggtcggttatgatccattcgtttccgtagacactgcttggagaatttctaaagaagtggaacgcgcgatgacgattgaagaagttttggcaacatgcgattatttaacggttcatgtgccattaacggataaaactcgtggcatgttcaatgcagaaacgttacaattagtgaaggataatgcggtcttactaaacttttcacgcggtgagctagtggattcagcctctgtgaaagaagctttagatgatggacttttacgtttatatattacagattttgcgacaaaagaattattaaaccataaaaaagtgcatgtatttcctcatttaggcgcatcaacggaagaagccgaaaccaactgtgctaaaatggctgcaaaagaattacaatattaccttgaaactggtagcattaaaaactctgttaactatccaaatgtggaaatgccttataacgggcatccgcgaattggtatttgccacaaaaacattccgaacatggtcgggcaaatcacgacagagcttgggaaatattccctaaatattttagatatgatcaaccgtagtaaaaatgaatatgcctacacattaattgatattgataaggaaacgcaagctaatttggaacaactgaaaagtgatttattggctgtccaaggggttttgcgtgttcgagttattgaaccattaggtgtgacagtttaaaattattacccgggaaataatgagagcatgaaactttatggttattgccagacgggttcatgctcttttactaaaaaggaggataacaatggtaaatatacgtccatttaaagcattacgtccaattaaaaatctagcggaaaaagtggcttcgttgccatatgatgtacttaattcggaagaggcgcgcgaacttggcgatgcaaataagtattcttttttacatattgataaggcggaaattgatttagatccggcaatctccccttatgacccagctgtttatcaaaaagcggctgataatttggagcaatttgagctggatggttggcttggaagagaagcaaacccggcattttatatttatcaactgacgatggatggtcgtccgcaaacgggactggttgtttgtacgtcgattgatgattatttgaacggaaagattaaaaaacatgagttgactcgggaagagaaggagttagaccggattcgccatgtggatgtttgtgatgcaaatacaagtccaattttccttacttatcgtggaaaagaagcgattaatacccttattgagtcttgggtgaatgaaaatgaacctgaatacgactttgagagcttccacggggtcactcataaggcttgggcaattacagacgctcatattctagaagacctgtcagcggcgttctcggaagtcccagcactatatatcgcagacggccaccatagaacggaatctgctgtaaaagttggtttgaaacggcgcgaagagtttccagaggctggaccagaagcagaatttaatttcttcttatcggttgtttttccagaagagcaattagaaattcttgattataatcgggttgtgaatgtgcctattgaagcagatttccttagtaaagttgaggctagttttgacgtggagaaggttgggaaggaagcatttaaacctgagaagccaaaacaagttgggatgtatttagatggaaattggtacaaacttacggcgaaaagcgatgtgattccaagtgatgttatcggtcagttggatgtttcgatattacaatcgcaagttttaacgccgatttttggaattgaagatattcgtcgcgacaaccgcattgattttgtcggcggaatacgtggcttagaagagctaactcgtttggtggataatggcagtcattcggtggcatttgcgatgtacccgccgacaatggacgatttacttggtgtggcagatgccgcagaaatcatgccgccaaaatcgacttggtttgaaccgaaattattaagtgggctgtttgtccacgatttagaaagtaagtagttttaagatgaagcgaattagttacttttattctgcggaaaatgagtctgagattaacctagagatatggaaaatgtttatgaatcaaagtgaagctgagcgaaaaatccattttgatcatacaggtattgtgtttgatattcagctaggagaggtcgggaaagtggacttgccagagcgggttcaagccctaattgataagaatggaatggaagctttgccgattttagttgtagatgaagcaatatacaattatggggagttttctgtgattgaagcggttgaggaattactggatgtgggtgtttctattcaagtggaagaagattgagatcaggagccagtcggagttagtttcggctggctttttgcatgagtaaattaaaacaaaccaatcaatttccgctatttatgataatataaaagtgtccgattaagttaaacgaaggagtgaatcgagtgtctcatttaaaagattatacgattggtattcaacacataaagcagctgacgtcggaaatttcacttggaactaaattggtatttgctatttctggacaaataacaattaagatttctgagcaaaaattttacttgcaggaaggcgatattttagtccttgatcgcaacactttttatacaattgaaggaaatgaagctaacttaattattgatttaacgatttcagatacattttttgcgcattattatgaggattattttcagcattcttttaaatttttctcgaaggagagtgaccctgggagagagcgggttgttgggtcgttgaggaagtcggtgagtgagcttttgattgcttcggcgacgaagaaacgagcgaataaattagaagcgcaatcggcgttgttccaaatcttattattacttacgcgttttttgaaaaaagggattccatcttctgctaggaaagaagtcaatgataaacggatttcgcgcattattcgagaagtggaggagcggtttgatgaagccttgtcgcttcgtgagtttgcacaaaaagagtttttaagtgaggcgtatttatcacgttattttaaaaagacgacggggcttggattcttgcagtatttgacggaagttcgattgaagcatgcgattcaagatttactacattcggcggaaagtattacggaaatcgcgttaaaaaacggtttttcgagtcaaaagcatttttcggaagtgtttaagtttcattttgagctaacgccaagtgagtaccgagcggaacatcatgcggaaacgaatttgttactagacaataagacatccgagctgggcgctagtatagagcaaattgtgccatctccggaaattttagtgaatttgtcgcggctttatcatgatgtggagccgggtaaggaattaaataaagcgccatttgagaaaaagaaaattgatattacggaaaaggcggctcgttgccttagcgaaaatatgaatattttaaccattggtgagcttaaagaagtgcttaaagctaacgtgcaaaagcagattattacgacacgcgatgaaattgggattaattatattggcattcgtcatttgtttagaggttcgacattcttgcctgaaacggaaacggacgagctagtgccgacatcttcaccgtacgctaatgcagatttggcgctcacgtttttaaaacagcaaaatttacagttgttcattcgcatagagtatcaagatattgtaggtgaggaagccgctgtttttgagcgcttggatcattttttaaagcattgtatgcaagtttttgggcgggaatttgtttctaagtggcattttatgttttttgaaccgaaaaatacatatgctgataaagacgagctgaaaaaaatttatttgaaaatatatcatattataaaatcgcgttttccagctatccaagtcggaaattttgttccgttttcactttctaaaaatgaagttccagaacggcatacgtggtttttagatgtggctgatgaaattgactttgtggcctataatgcgaatcaaaatgaagcggtggatttttcgaaagaagatatgaagtcgtttatgatttccgaagattattgtttatctaaaacgcggaagttgaaggcttttttgaaacatcatcatattaataaacctcttatgctggtgaactggaatacgctcacgggaaatacgcggtatacgaatggtacgtttttccgaggtgcgttggttttaaaaacaatgctagatttggcgccagaagtggatgcgttagggttttggattaatacagaactgcatgaaggtgatgacagccagttaaatattagtttagatgggattgaaatgttccacttttttgacggaaaaagaccggcgttttatgcggtgaagtttttgaggaggcttaagggtgttgttgttgctgagggtgcggattttattatgacgaagcatacagacggataccaacttattctgatgaactgtgcgaatatcaacccgagatattctgtggaagagagatttactaaggaagagcagaaagaactgcatattcgaataacggggcttcaagctggggaatatcaagtgtgtaaatggcaattcgaccgcgataatggggcgctttattcgaagtattggcagcttaatagtaagtatggactggataaagagattttggattatattgttgatgcctctcagccgacactgacggtgagcgatgagacgattacggaagattggtcgttttatgcgtatttggatattaatgcgattcacttttatgagtttagaagtacgatttaaaaagttcaactcttgcagttgagctttttttatgcccttaacaccgaatttttgacattggttgacgcggtttagaaaagaagaaaatttcaagctaaaactaagcaaaaaagcaaacttcttttagtttgtttttttttataataaaggtgtagttaaaaatacggatgttctggccagcagatgtattaaaaatggaggtttggataatgaaagagaagttatttcaaaaactagacgaaaaacgagatcgaatgatagaaattcgtcgttacttacacgaacaccctgaactttcttttcaagaggagaatacggcgaagtatattgcggatttttataaagaaatggactgcgatgtgcggacgcatgttggcgggaatggcgttgtagtaacgattgatacaggcaagccgggcaagacactggcaattcgcgctgattttgatgcacttcctatccaagaagaaactggcttagcttttgcatctaaaaaccctggtgtaatgcacgcttgtggtcacgacggtcatactgcttatatgcttattttaggcgaaacacttattgaaatgaaagaagaattaacaggaaaacttgttattttacatcagcatgcggaagaaactcctcctggtggcgcgattcaaatgattcaagacggggcgctggatggtgtggataatgtgcttggaattcatgtgatgtctacgatgaaaacaggcgaagttttctaccgtgagggtgcgattcaaactggtcgttcttattttaaacttaaggtacaaggtcaaggtggacacggctcatctccgcatttagcgaatgatgctattgttgcggcaagtgaatttgtagtagctgttcaaactgttattagtcgccgtttaaacccatttgatgttggctcgattacgattggttcttttgacggaaaaggtagttttaatgttataaaggatgcggttgagattgaaggcgatgtgcgctcgatgtctgaagaggcacgcaacattattcaaaaagaaattacccgtatcgttagcggcatagaagcaatgtttggcgttacttgtgaacttgattacaaaaatgattatccggttttaaataatgacgaagctttgactgatttcgttgttaaatctattaaaggggcgaaaatccctgaaatcacggatgttgtgcgttgtgaaccgcaaccaccttcagaagactttgcttattatgcaaaagaacgcccaagctcatttttctatgtgggagcaatgccggcagatggtcatttttatccgcatcatcatccaaaattcgacatcaatgaagattcattattaattgcatcaaaagcaatgggagcttgtgttgtagattacttaaaaggagagaataactaatgacttcaacagcgtataaaggtacaaataaactaatcgttgggattgtttttggggttatcacgttttggctttttgctcaatcaatggtgaatatcgttccggccgtgcaatctgaccttggaatttcctctgatttacttagtattgccatcagcttaaccgcgctattttcaggtatttttattgttgtagcaggtggtatggctgacaaatttggtcgcgtgaaattaacttatatcggacttattcttagtatcatcggttcactgctacttgttgttactcaagggtcgacgctacttattatcggccggattattcaaggtctttcagctgcttgtattatgccagcaactcttgccttaatgaaaacttattttgacggggcagatagacaaagagcacttagttactggtcgattggttcatggggcggatcaggtatttgttcgttcgcaggtggcgcaatcgcaacatacatgggctggcgctggattttcattatttccatcgtattcgcactacttggaatgctactaattaaaggtactccagaaagtaaagtcgttcaaaatacaaaagcaaaatttgattcatttggtcttgttctttttgttatcgcaatggtttgcttaaaccttatcatcactcgtggggctacatttggttggacaagcccaattactatcgcgatgctcgttgttttccttatttctgcgggattatttttccgagtggaactacgacaagcaaatggatttattgatttctcgttatttaaaaataaagcttatacaggcgcgacactttccaacttcttgttaaatgcagctgctggaacgcttgttgttgcaaatacttatgtgcaaattggtcgcggttttacagcattccaatccggtttactttctatcggttaccttgtctgtgtgcttggaatgattcgtattggtgaaaaaattcttcaacgagttggcgcgcgtaaaccaatgattctaggatctggtattacggctgttggtattgctttaatggcgctcacttttattccaggaacattgtatacggtgcttgtgtttgttggatttgctttatttggtatcggacttggtatgtatgcaactccttcaacagatacagctatctctaatgctccagaagataaagtcggagtagcttctggtatttacaaaatggcaagttcgctaggtggctcattcggtgtggcaatttccgctacgatttatggtgtgattgcactatctggaaatattgatttagctgcaatggtggggcttttaactaacgtcggtttttgtgtcgtttcacttatttccgtcgctgtaacaacaccgtctgcgaaaaaagcgctcgaattaaaagccgcaaaagaataggaggttggatttatcatgcgtaccaagttaatgaatatgcttcaggaacgaaaagatgaaatcactcagattagacgtcatttgcacgaacatcctgaattatcgttccatgaagcagaaaccgcaaaattcatccaagatttttacaaaggaaaagacgtagaagttgcaactgaagtgggaaatggccatgcggttgttgtaacgattaaaggcggaaaaccgggaaaaacaattgcgttacgtgccgattttgatgctcttcccatcgaagaacaaactgatttaccatttaaatctaaaaaccctggcgtaatgcatgcatgtggtcatgatgggcatactgcttatttacttgttttggcagattgtttaattcaactaaaagaaaatatcccgggaacgataaaaattgttcatcaacatgctgaagaaacaccacccggcggagcgaaaagcgttgttgaatctggtattttagatgatgtggatcaaatttttggtattcacgtatttccatttggtgaaagcggacaagtttattaccatagtggctacgcgatggctggtcgcacttattttaaacttaaaattcaaggcgttggcgggcatggttcgtctccacatatggcaaatgatgcgattgtcgcgggtgcttattttgtgacagccattcaaacagtagtgagccgccgtttgaacccatttgatactggcgttataacgattggttcttttgacggtaaaggtagttttaacgttattaaggatgcggttgagttagaaggcgatgtgcgttatatgaacacggaaaatcgtgataaaatagacgcagaaattcaccgtattgtttctggtattgaggcgatgtttggcgtgagcgtggaactcacttatacgaacgattacccgccgctatacaatgatccagcagtgacagaacaagttgtcgctagtttgcaaaaaggtctaggagagtacttaacagacatctccatgtatgatatgctttcagggtcagaagattttgcatattatctacaaaaaatcccgggtgtctttttctatattggtgcgaaaccgaaaaacaccccgcacgcttattttaatcatcatccgaaatttgatattgatgaagatgcgttgttagttgctgctaaatcagttgccgacgtcgttttagattattttaaattgaatggataatagctttgaaaagagcatagtcagaaaatgaatctgggtatgctctttttttagtagtgggactatagaagagtggagtgaggtcaaatgaatcaggtaaaaggagaaaagcattcgttaatggtattacttgttctatttataggctataccagtgtatacgtggataaatatactatcggaatttcacttgtgactgtttctcaggatttaggatttgatccaagtcaaaaggggttgattttaagtgccttctttcttggttacacgctttttcaaattccaatggggtatttaaataatcggattggtgcacgtcctgttcttgctatatcgataattatcgttgggctgtttcttattatttttggttttggttattccttgctgtttttggttgtgattcgtttcttgtctggagcgttcgggcatgcgggttatccgccatctgttagcaactatatttctcttcatattccattaaacaagcgaggttttgcgcagtcagcaatgctcgcttcctctggttttgcggcatttattggtccgcttttgattgcgcaactattgctatcagttggctggcgtaatacttattattggattggtattgtggtgattttcattggattattaattttattagtagttccaaaagcgccaaaaatagataaaagtacgcaaaaagaaaaaattaaagtacctttctcagagcttttaaaggataaacagctgtggattcttttattatcggcactctttataaatgcagcgaactacggtttaacaagttggcttgcttcttatttgaatgaggcgaggggaatttctattagcgaagtgagctatattagttctttagccggactttgtattttaattgcgggtgttattggtggctattttattagtcgtttcttcaaagggaaagagccaatcgtcatttttacatttagtgtgctcggagcgtttacggtttacggggtgtatttgtttgatcagttgatgctttcgattatttgtttatgtttatgtaatatttttctaattatggcctttacgactttaatgggattgccgcataaattatttaaacagagccatattgcgacaaaatacgctgctattaactcgggcggagttttaggtggctttttcgcaccgatgattattggggatttagtaaatgcgacgaactcttatcaatcagcttttctcttcttggcgctcactttcttagtatcaggaattattgttctagcgataaaaaaacgttcggtaatcagtgaataaaaaatgggaggaagaccagatagactaggttttcctcccatttttattaagctaatccgccattggtgaaaattgtttggccatttacccagcgtgccggtccagctaaaaaagctactgtttcagcaatatcatcaggttgtcctagacgttctaacggggttgcttttgctaagttttcaattgtttcatcatcttttccggttaaaaatagcggggttgcggttggtccgggtgcgacggtgttaacggtaatatctttcccacgaagctcgcgcgctaaaattaaagtgagcgactcgactgcggctttactagcaacgtaagccccatatgccagaaaactggtgcgcgttaccgaagtggagaaattaataatcgcgccaccttttcgaacgcttagggcagcttgtttggaaacgacgaaagttcctcgcacattggtacgttgaatctgatcgaaatcttccatatctaaagtagcaatgggacttaatttcataatacctgccgtatttattacaacatctacgccaccaaaatgggctgtaattaaatcaaatgcgtcaatcatttgcgcttcgtcagccacgtcaccaccaacgctaatcgcttcaccaccagcttttactatttcctcgacaagtgtttcggcttttactttgttacctgaataatggacagcaaccgcaaagttttgctcgactaacttttcggcaatggctttcccaataccgccagatccccctaaaataaatgcgacacgtttattagtcataatctattctctccttcattagttacttttttcatgttaagtaactttatagttggaagtatactccttttggttactttgtcaaggatttgtaactttttaattttcctgtataattagaaacaaagaatgagtggaatcgaggtattacaatggcgagattatcccaagaaattattttagatatggctgaacaaattatttatgaaaaagggatggaaaaaacgacactttatgatattgcgggaaatttgaacgtcacgcatgcggcgctttataagcattatcgaaacaaggaagatttatttcaaaagctggcgttacggtggctagaggagacctcgcgggagatttttgcttggacgaaagagaaagatgcttccccggacgatgcgctccatgactggttatggctcttagctgacaccaagaaaaccctgtataaaaccgaccggaaaatgtttttactttacaccgattatattgaacaaaaggaagaattagtgaaaaatcatatcgaacatctcgcgcaaaaagcagaggaagttagcggccgggtgaaccaaggtgacgcgattattacggcatttatttattttcacaacccttattttgcgagccgctgggaaaaagcgggatacgtggaattattcgagcgtgtttggcaggttgtgagatagtaagagaggagagtgctacatgacagaaaaagcaactttggctaaacaaatattacattttaacgaaacactttcgagtaactcaatggatttgccggccgggtatcgcgtaattaacccatatgagggcgatcaaaaagaactagtgcgaaatataacgactaggttttatcagaaatactacaatgatacaaaaccacgccggataatattcggaagttcacctgctcgccgaggttctgctgtgacaggcgttccttttgaagatgccaaacatctccaaagtgaaacaggcatttttattgatacattttatataaatcagtcttcatcagattttttatatgatgttatgaatgaatacgggggttgtgagcaattttatagtgatttttatatgaattttgtctgtccgctagggatcgttcgtataaatgcaaaaggtaatgaagtcaattgtaactattacgagaacaagcaattacgagaagcgctaatgccgtttattatagagtcgattcgtagtcagatagactttggaatggatacttcggtttgttactgcattggtagcggagagaattttaaatttttatcaagaataaatgaagaacatcatttttttgagacgattatacctttagaacatccacgttttattatgcaatataattctaaaaataaagatacgtacatggagaagtatctttgtgctttaaaaatctaacaacaaacagagaggacgagagcaacatgaagattgatacacaaaaaatcgttaatttcgcgattgaaggggtgggaaaattcctgcaagaaaaccctgagttaacatattatgcttttgcgttcgattgtaatgctgaatatgcggaaatcaatttatgcgtaaatacggaagaagcttttgctgaaatactggcatattatcaaagtggcaagtatggtgaaaactatcaaacggaagaaaatattcaagtcttgaaatacaatacaggcgactggaaataccaatgttttgatacattttatgtttttagtgaagaagaactgagcgccatatttaataaaatataccctaatgaagtcgatgatgattatcaagcatggaaagcatttgtaaatgagctgctagatgcttttacagaaagtataattcaattttcggagacaaaaaccttccaaaaaatcaataaaacagcggattttaaatttttctgtatagatcatgacgaagaattagcggattcaatgacgcgaatgcaactttttcaaaaaaaataagccatcaaaaaagggattttgctaaaaagccgaatcccttttttgtgtgactaaagtcctttaaacccaatccccatcaatttttccgtatccttaaaacgtttctccgcagtatccgcatccaaaacaattgaaataacacgctttccatcgcgctttgctgttccgataaagcaatagccggcttcatctgtaaaaccagttttcagtccatctaaaccttgtattgaaccgatagagtcattggttgattcaagggttgctccttcttcggttatgatgctagatttggaagttgtctctaacacttcgggatgagtggaaattaatttagatgatagcaaaaataaatcctttgtggtagaaacagccattttaccatcaacatcgagtccgctggcactgacaaatttggttttattcgataatcctaattttttagcttcattattcattttttgggggaaattagcatcatctaaacggttgcctagtgtctctgcagcatcatttgctgacataacgagcatagcgctatataagtcccggactgaccatgttcttttttgtgtaattgcgtaaagtgaaaccgcggaaggatcatccagacgaatgagatctaactcctcatcccaagataattttttgttatccacagcctcaagtactaaaaatgccgtcattaattttgttaaactcgcgattggcatgactttatcggcatttttttcgtaaaacgccttaccattttcggtcgaataaaccgcagcggcatttgctgataagtatacattcggttgctttgtggaacacgatgagagtagtaatagccccattagtagtatccatgttagcttatgtagtttcattatttctcctccttttgactttagtatagagtaaaagagttgagttaaatccaaggaagtggaaggatatgttaaagctttaacgagaaaatttaagttttcttaactagtagagataaaactattgttattcacatgtggataagttaaaatggtagggatgaatttttattaatggtttttctgtggatatgttaataaatctatggataaccttcaaaatactaacaatttaattgctttggtcaaagcggagcgtaagttgttgaaaatgcacaaaatcacgtgccaaaatttattcaaaataggataaggcttatttgagctgaacttctaatgagaaaggatgagtaaagaatggaatttgatactattgctgcaatctcaacaccgccgggagaaggggccattgctattattagattaagcggtccagaggcgattcagatagcggatcgtattttttatgccaaaaatagcttaagtgaagcagaaagtcacacaattcactacggtcatataaaagaagacggcgaagtaattgaggaagtaatggtcacggttatgcgtgctccgcgtacttttacacgggaagatgttgtggaaataaatgcacatggcggaatcgtttcggtcaatcgcgtcttgcaactattactaagaaatggtgccaatttagctgaaccaggtgaattcacaaagcgggcatttttaaatggaagaattgatttgtcgcaagcggaggctgtgatggatttaattcgcgctaaaacagaccgggcgatgggcgttgcaattagacaaatggacggaaatctttcacggttgattcgcaatttgcgccaagaaattttggatgcattagcccaagtcgaagtaaatatcgactatccggagtacgatgatgtagaggaaatgacccagcgaatgctactggagaaaacagagctagttcgcgcttccgtcgagcaacttttacaaacagcaagccaagggaaaattctacgtgaaggccttgcaacagccattatcggtcgaccaaatgtcgggaaatcatccttgcttaaccaactaattcaagaagaaaaagcaattgtcacagatattgctgggacgacgcgagatattatagaagaatacgtcaatgttcgcggcgtaccgctgcgtttaattgatacagctggaattcgcgaaacagaagacattgtagaaaaaattggtgtagaacgttcaagaaaagccttggcggatgccgattttatcctgttagtattaaatcaaaacgaagagctgacagtggaagatgaagcgttatttgaagcagctgcgggtcataattatgtggtcgttttaaataaaacagatttggaaacaaagcttgatataaatagagtgcgtgaacttgcgggagaaaacccgattgtttccacttctctagtaaacgatgaaggtttagaggctttggaagaagcgattaaagcactattttttgctggggacattgatgccggtgatgccacgtatgtttcaaacgttcgacatattgcgctccttcatcaagcacttgaagctttaaatggcgttacaacagggattcagctcggcatgccagtggatattgtccagattgatatgactcgtgcatgggatttactaggtgaaattactggtgattctgtccaggatgaattactcgatcagttgttcaatcaattttgccttggaaaatgattttttaggagatgtttttataaaatgcaaacctatgatgcaggaacttttgacgtcatcgttgttggtgcaggccatgcgggagtagaagcaggtcttgccagtggtcgaatgggcgccaaaacgctgatgttaacgataaatttagatatggtcgcttttatgccatgtaatccttctgttggaggcccagcaaaaggagtagttgtgcgcgaaattgatgcacttggcggagaaatgggccgtaatacagacaaaacttacattcaaatgcggatgctaaatacaggtaaaggtcccgctgttcgcgcattacgtgcccaagcagacaaatgggattaccaacacgaaatgaaacacacgattgaaaaagaagaaaatatcactttgcgccaaggtcttgttgaccgtttagtgattgaagatggcgtgtgtaaaggcgttattacaaacagtggtgcaatttactacgcgaaaacagtcgttattactaccggaactttctcacgtggcgaaattattgtcggtgaactgcgctattccagcggtccgaacaaccaacaaccatctgtgaaactttcagagcacttggaagaactaggttttgaactgcgccgctttaaaacaggaacaccaccgcgtgtaaaatcaagtacgattgactattcaaaaacagaagaacaaccgggtgacgatcatccgcgcgcatttagttttgatacagtagaaatgatgctagaacaattaccgtgttggttaacttatacaaacgaaacaactcacgaaataatccaagcgaacttacaccgttcaccaatgtttacagcaacgaaaaaaggcactggcgcaagatattgcccatccattgaagataaaattgttcgtttcagcgacaaaccaagacaccaaatcttccttgaaccagaaggcaaaaacaccgaagaagtatatgtccaaggtctttccaccagtttgccagaagaagtgcaacgcgaaatgctaagaactattccgggacttgaaaatgtagaaatgatgcgtgttggctacgctatcgaatatgatgcagttatgccagaccaactgtggccatcacttgaaactaaattagttgaaggacttttcacagccggccaaattaacggtacaagtggttacgaagaagcagccggccaaggcttaatggcaggaatcaacgcagcacgcaaagtttttgaaaaagaaccagttatcctcggtcgcgatcaagcttatatcggcgttttaattgacgatttagtaacaaaaggaaccgaagaaccatatcgtttacttacatctcgcgccgaataccgtttactattacgtcatgataatgcagatttacgtttaacagaaatcggtcacgaaatcggcttaattagcgacgaacgttatgaacgctttttagcaaaacaaagagcgattgaagcagaaaaagaaagactacaaaaaacacgcattaaaccaactgctgaagttcaagcaatgttaaaagaaatcggctcaggtgaactaaaagacggaattctagcagcagatttacttcgtcgcccagaaataacttacgacaaaatcgcccaaattgtttcacgtgaaacatttgtgaccgacgaaatcgctgaacaagtagaaattcaaattaaatacgaaggctacatccaaaaatcaaaccttcaagtagaaaaaatgaaacgcatggaagacaaaaaaatcccagaaaacatcgattatgatgcaatcagcggcctcgcaacagaagccctagaaaaactaaagaaaatcgaacccctttccatcgcccaagcgagccgtatcagcggggtaaacccagccgatatatctatattgctagtttacatcgagcaagggaagatagcgaaagtaagtaaataagaacacggattactataataactgaaaccacatgttcacgaaaacttcaaacttaccatctaagttgaaagtttccgctgaataatgtggttttttcttgtttttaattaaggtagaatgggattacatagaagaaggcatactagagatgaaaaagaaatcggttaaagcgttgagagtaattattttcttagagaatgacatccaatatagatgaagaaatataatctacagtaagtgcgtgaaaaagctattgaagataattcaagaactgatattattataagagtaagagaagaaacttatttcttataatatttaacgatttgttaaaataaatttaaaaagaggtgagtatagtatggaacggattaaattttatagttcatcagatatatctagcggttatcattttaagaggctgaaagaacttatcgagtctagtgaagacatagaaacaaacaatcttttggatatgctagaagtatataatattttgaaattcatgagtaaagaaacttatcctgtcaatttatcagataagcagattaaagagactaagagtatacttaacagaaaacttaatcaatttttccgagagttatcaaaacaagatattttagaattttttgattatttttttgctcaaaataatccggatttaggtggaaatgtagtaaaatatactgatatggacaagtatagtgacactctttataaagaagactttttagaatgctttgaaaagtataaattagatgcgaaaattagtggaaatgacatgagaggcttttttaaagaacacgaaatccctgttgaatattttttgaaaactaattattttgtgaaacattatcctactgtaataaaggatatatttcttgcgaaagcaagaaatttcgaattagttttagataactatactcctagtgaaactaggtattttattcctaacaacattacgaaagatgaaatgtataatctttgcaaactatatataaagggtgaggcagctgatttaaattatctttatttggttgggcaaggaattcaaggtgttaaggaacttcaaattgatgctaaattaaaattaaagtctaggaaaagatgtgcgcaaatagagaagaaaatttttagtgatgaaaatggcaatgcaaataatggaatagagcaatcaatagttatttattcagacaaagaaaagtatgatatggcgaaagaagattttaaaaacttaattgacattgactatttaaaaaaagaaaaatccaaagaaaatttattagagtatatgatgtattttaatggttttttcacaggaaattggattttaaatttatgtagttttcctaacatcgaaagttcaactttaatgaaaaagttattggggattcatactaaaaaaaattatgaaacaagtttttatttcaatggtaaaaatatcttgatgttaataagctttaaaatatatcaggataaactacaagagatttttgatataagaatagaagaactgatagtttactttttttcagaatatagtaaggaatactttcttgtaaactggctaccaatagattttacgaacaagtcagaaaaaattcatattcagactaaaaacttagttactatagaggaacaattaagaaaacaatggaaactatatattgaggaaaatgaaatagataaagaattattcgaactagaagaaacgccaacgcttaagtcgttaaagagtagattagacaggaaatatatatatataaatcagaataataaagccattctcagagttatgtatttacttttttcagatcaatcacatataacgtatataactaaagagacaaatggagataattttgtagaactaatagttaataataaaattaaaaaagatgattttcataattatcaacgattagatattgaatttttacttgataattatattatttcgattgataaaaaaggagatatattcataactgaaaagcagttattacgaatccgtattttttctaatatttataaatatggggttattcattattaccattcgaataaaaaactggatattaataaagagttgacatatcaacaacaagagatagatgaaatgattgaagaggaattattaatttatgagaatactttttttgccaaacctgaggtagactatctaaactacatccttaataattctgaatttgacaatgcattgggtataagaaacaaatattcacatggatctattgtagacgaaaacgaggatgattatttttatttactaatcgtcttagtagtatatattattaaaataaacgaggaactgatccttaacgagagatagggagtgagcagtataaataagttgtttattatagggaacgggtttgatttagcgcatggagttccatctacttttaatcattttaaagagtatcttagatgtacatatttatatgaacacgatgtatatcctagtctgtggttacctgcttctacagattacgatggtgagatatgttataaaattgaagattgtgcacaaataattgattttatgatttgtgatagttgtttaaggattggttctgaagacgaaggagagaactggagtgattttgaaagagctattgggcgttttgattattctttgctagaagaggatatagaaattcaatatgataaggaaggggatataaatccttttcatacgggaaataattatgaagatgcatataatgatttaagtaatgtaatgttaaaattacctgagcttttctctgaatggataaataatatccctattctggaaaattgcttttctgtgttcaatttagataactattattctattttagaattaattgacaaagaacatgatgtttttctaacttttaattatacagagactctggaaaatctatatgaggcagagaatgttacgcacatacatggaaatcaaacttcccctgtgttaggtcacaataatacctcacgaatagaggaacaaagttatcatcaagatacctatataaatactatgaatgaaactttaaagaaaccaacagatagaattattgaagaaaaatcgtatttttttaagaacttagagggagaaattgattctatttattcatacggtttttcttttggagaagtcgatttgatttatcttaaggaaatatttaaacatttaaattctaaaaatatgatatggtatctccatagttatgacagacaacaacataatgagtttaaactgaaaataaaaaaatgcggatttttaggttctttttctgaatttaattgacatgatattataagtgattggaattcaatatttagactgtattgagtaatatcaaattgcgaaagtacgtaagtgaaaattggattactactacaaccaaaaccacttgttcacggaaacttcaaacttaccacccaagtctgaaatttccgctgaacaatgtggttttttcttatctacctataaggtaaaatgggattacatataagacatagaacagaggtgaatgtgtgaaaaagaaatggataatactatttggaattgtaataatgattatttttggtttaggggtgaaattctatatggatgaagagaaattaaataaagaaatgatgaatgtgatttatagtgatgaagcgaaaaaggtatttgaagtcagattgaaagccgcggatgcagatgcttttacagaaaaaggcataattcaatcgtatgaaatagatcagaaaagtataaagaaaaatccaatgggaggaatcaatgtcacattaattataaacggaaattctgaattatatataaaatatactatgaacaattttaatggagaactgagcggtggagcttcagttacatcgggaaatcttgataaacttcttatggactagaagagagctaatgaattacgccaatactaatcatagatgttaaaaagactgaaaaaagaaggcggaaatttctaacatataataaaattaacccatagataaaaagtcatacaacagaggtgaagagttgaaaaagagatgggtaatagtactaggaattacagtgataaccatttttggtttaggggtaaaattctatatggatgaagagaaattaaacgaagaaatgagaaagctggtttatagtgatgaagcgaaacaagtattcaatgatgatataaaacttattgatacgaaagctttcacaaaagaagggataattcagtcatatgaagttgaggaggaaagtatagagcctaatccaatgggtggaataatagttacattagttattaataaggatcctgctttgaaattaacatacacactgaagaaaaataataaagaattaaagagcggtggagcaagcatatctaaggagcttacaaaaaaattgggacttttgaatggatataaatgagtttttatagagctaagagacgattaaaagactgaaaaaaaagaaagtgaaaatttctaacatgtgataaaatagacctacaaataaaaagcatacagcagaggtgaagagttgaaaaaaagatggataatagcactagcaattacagtaataaccatttttagtttaggggtgaaattctatatggatgaagagaaattaaacaaagaaatgaagaaagtggtttatagtgatgaagcgaaacaagtattcaaaaaaaggttaacaaatttagatccaaatgcttttacagaaaaaggtataattcattcttataaaattgaagaaggaagcgtagagcacaacccaatggggggtatagaagtcgaattaataattaataatgattcagaactaaatgtatcatataccttgagcaagaataatggagaattaagtggtggtgcttcagttgtatctgaaaagctttctaaactattaggtcgttgggaggagtagtgatgacggggcatgtaaatactgatcaagaaagagtagaattggcaaaaaaagagtacagtaagctagaacttaagaaggaggtgaatatttcaatatccaatcgagaaaaaaagataggaatcgtatcccaaacaatcaacaacaaagcagccggacagcaaacctatatcatcacagaaaaatacacgccacccacagcttcccatactgagagaagcaaagtaaaagagttaacaattctttacagaggttccactgcgcccactctggcaagtggtcttacgccgtttcataaggatagtcttgatgtgtggacggattggggcgtaaatgatattccaactgcaatccaaatcacaaatggcggaggatccacagtaacaccccaactaaaaacctccgcagaaaccttaaaacaaaccatgaaactctacccaaacgcccaaatctatgtatacggccattctctaggatccatgaacgcccagtacgctatcgcagacttagataaaaaagacatcaaacgcatcagcggcggtttcttctaccaaggtccgaatatctactccaacctaacgccaaaacaacaagataccgtaaaagcaataaacgctttagatagattatttaattttattgataggaaggattatgtggcaattggttatggtactggagacccgacaattggtcatttaatagaggttgagtcgaaaaaagctggtttggttgagcagcatatgtggggtggttatcagtttgacaaagaaggaaacattctaacaaataaagaaggcagccttcaactagccaaatacgcaacagctcaacaattagcagcaatcaacatcatgcgaaccagttttacaaaaagcggtggtggcctatcctcatccgaagaaatattcttggatgcagcggaagcactagcaattacgcaagggatgaaacaaacgattcaaggcgaaattagagctttaaaagatgtttttgataaagaaatcgagaatgctgaagagttgtggcgcgatacgctttcagatgcaagggatatcggctccaatctatctgagtcagaaatactcgccgcacttgcttggggcagggcgactgagccgaaaattgtgatagacacagtgcaagattgcgaaaaatccttagtcgaagcaaccaagatagagcaagaatatgataaattactagaacaaatcaacgaagcgataaaaagccagctaaaaaccgaccaagaattagccaaacagatagggagcatgtatggataaacaaagacaactactgctaaaactagaaaatttggacgatgagtttaatagaaaaagacgtcaattggacgaagcgatggatgatgcatcccaagaaaaatggcggtttcaccaagaactagaaaacctttctgaacaaataaggtacatccatcaaaaaagagattgcgaaacatctgaagacttgcaaaaagcctaccatttaatcaattctatccaagaagaaggcgattggacagtaaaaaacacactaacaaaactagaaaatgaacacgaagagcatcaagcactttataagaaacaagcgaattcttatgaagaagaactacatcagctaaaaaaggatcgtgatctataacatgatagataaactaaaagcagaattattagagtcacgcagaaatctagaaaaaaatcttattgggatgtttgtggcgagtcaaactcatgcaacatcagaaaatcgcaaacgaatgttaaaaatgatcaagcaggacaaaatagccgatatcaaaagcaattgtcagggttacatagatggactttctaccacagcaaaaggaaaatgggtaaatcaagccaaaaaaagttttaaagagaatgccaacaagtttgataattgttaaacgtaatacgagcttgctaaatagcacgaaaatatttatacttgaaaataatgagctaaaaatatagaaaatcaacggtacaagcctgtttaaaagtataaaccaaacccgtctaccatcctaaacacggcaaaaatcgcgataataaagtgaggaaaaaacatgaatccagagcaattccaaatggcgctcgctgaaaaaggaatagaactaagcgacgaccaaatgaaacaattccatgattacttcaaaatgttagtagaatggaatgaaaaaatgaatttaacagctattaccgacgaaaaagaagtatatttaaagcacttttacgattctatttctgccgcgttttatgtagactttactaaattcgatactatttgtgatgtcggggctggcgctggttttccaagtctcccaattaaaatctgcttcccgcatctaaaagtaagcatcgtagactccttgaaaaaacgcatgactttccttgacgcgttagcagaaaaattaggcctaaccgatgtgcatttctaccatgaccgcgccgaaacatttggccaaaacaaagcgcaccgcgaaaaatacgaccttgtaaccgcacgtgccgtagcaagaatgagcgtattatccgaactgtgcatgccacttgtaaaaaaaggcggttcattcctagtaatgaaagcagcccaagccgaacaagagctgcaaacagccgaaaaagccatcaaactattcggcggaaaagtcgaggaacatttcgctttcgcattaccagtagaagaaagcgaacgaaacatctacgtcatcactaaaacaaaagaaacccctaataaatatccgcgcaaacccggaacacccaacaaattaccaatcgaataaactaacaaagtcctttcaaacgaaaggactttttatttttaacagcaacgtcattttttaaagctagtttccataagcaaccacacccaaatatgaaaataattttcatttaatcgatattgataaaatcattttcttatgatatagtctgtttgaaaacgcatactttacactgaaacacagtatagaggaggagtatcagtgggcaattctgttatggaaaaaatcaaaggtgggttagtggtttcctgccaagctttagaagacgaaccacttcatagtgcatttattatgtcgaaaatggctctggccgcagttcaaggtggtgctgttggtatccgagcaaataccgcaaaagatattcgggcaattcaaagcgaggtggacgtcccaattatcggtatttacaaaaaagattacgatgattccgacgtatttatcacaccaaccttaaaagaagtcagagaaatatgtgaaacgggagtagaaattgttgcgatggatgcaacaacgagaaaaagaccacataacgaagacctcaaagacatactaagcgccattcgaaaagagtttccaaacacgcttttcatggcagacacaggcagtattgaagacgtttattacgctgattcccttggctttgacttaattggcacgacactttacggctataccgaggaaacggcgaataaaaatatcagcgaccacgatttttcccatatgaaagaagttttgaaaagtacgaagcgcccagtaattgcagaagggaaaatcgattcgcctagtaaagcacgacaagttcttacgttaggttgttatgccgttgttgttggcggcgcagtaactcggccacaggaaataaccacccgctttacaaatgaaattaaaaaaatctaagaagaaagaggtaagtgacatgacaaagcaaatcaaagttggcgtaattggtgttggacaaatggggcagtatcatgcagaaatttatcaaaaacttccgcaagttgagttagtggcaatttgtgagtttaacgatgaaagacgcgcagaaatggcagaaaaatttcagtgtaaagcatataaagactaccacgaactcctagcaaatactgagattgaagctgtgatcattgttttacctgataatatgcaccgtgattgtgtggaggaagctgtaaaacacaaaaaacatattttacttgaaaaaccacttgcaaaagaactagaagacggcaaagcaatgtatgaactgacaaaagactacgataaagtatttacagttggatttttactcagatttgatcctcgtttcaatatgattaaacagcgcctcgataacggcgaattaggcgatattattcatctttattgtcgtcgtaacagcccaattactgggccaaagcgttacataggtgcttctgatttaagtatgcacgtaatgattcacgatattgattatattaactggtacatggatagcgagccagtcaaagttatcgccaaaagccgcagtgttttacttaaagaatacggcatgaatgacgtgatttatgccattgttacgtacgaaaatggcgcaattgcttgtcttgaagcttgctgggtgttgccagaaaattcgccaaccatcattgacgacaaacttgaattagtcggaacgaaaggtgtggcatatgtagactcttgtgatcacggcgttcgctttgttagtgaaaaaggggtatcttatccggattcaagacactggtattacacaaatggagaagtttccggcgatttagctgaggaggtaatggcatttattaataacgttgcgaataacacaaaatcaatcattacaccaaaagaagcgtatgattccttacgagtagtagatgcgattgaacgttccattgctgaaggaaaagaagtatcactataaaatagcgccacacatatgattggagggggaaatatgtctattcgggtacatgtacagaagtttgggagtaagctaagtggtatggtcattccgaatttgggagcttttatggcttgggggattttaacggcgattggggtcgcaacgggctctgaaatgttaaaaggctttattgcaccaatgcttaattacttgttaccactgcttattgcctttgctggaggtcgagcggttcacggttaccgaggaggagttattggtaccgttgcaacaatgggagcaattattagttcggatataaccatgtttatcggcgcaatgataatgggtccgcttgctgcttgggtacttaaaaaatttgatgaacgtattgatggaaaaattccagctggctttgaactattagttaataacttttcgattgggattattggagcgggattagcgctattttcttatgtggcgattgctccgatggttgaaactgtaacaaaagtattagcaagtggcgtggatgtgttaattaacaatcatttgctcccactaacggctttaattattgagccagctaaagtcttattcttaaacaatgcgatcggtcaaggtattcttagtccgctagcaacattgcaactcgccgaaacaggaaaatcggtgctttacttactagaatcaaatcctggaccaggtcttggaattttactcggttatatgttctttggaaaaggaaactcaaaagcatcttcctacggggcaagtgttattcacctatttggtggtattcacgaaatttacttcccgttcgttttaatgaacccaattcttatcttaccgctaattcttggtggtatgacaggaacatttattttaacaatgacaaatgcgggacttgttggtgtggcctctcctggtagtattatcacaatcatgatgatggcagcacccggcgatcatattaaaatcattatcgcggtgttatgtgcggcgcttgttacattcattaccgccataccatttattaaacgcatggggaacaaagattcagaactacaagacgcggcgaagaaaatggaaggtcttaaaggcaaaaaaagtagcatttcctctgttttcgaagctccagtagatgattttaattttaaaaatgttaaaagaatcgcctatgcttgtgatgctgggcttggatcaagtgcgatgggcgcgaccgtgctgcagaaaaaaatcaaaaacgctggcttagacgatattaaagtgttccatatcgccatccacgaattgccgaccgaatgcgatgtggtcgtgacgcataaatcccttatcgaccgagccaaagaaaaacaaccagatgcgtattatgtggaaataacggattacctcggcgcgccagaataccaagaactaatagataaaatagttgcagaccgagaacaaaagaattaacttatttgtaagcgcttctttttaggagcgctttgaatagtaaagtgggtaggaggaagatgatgttaaaagcagttgtgatggattttgatggaattgttattgatacagaagtagtttggtacgaaatttttaaagattggtttaaaacaaaacaacattatgatctttctattgaggaatttttacagtgcgtcggatctaatgtggacgatttattccgtgaattaaatgagacacagcaaatggatattaatcgccaagcattcgaagcagaaacacaagcaactttcattgaaaatagtaaaagcttaccagccaaagaaggcgtggaaagttttattcgtgaattaaaagagcgcggcttaaagttagcgcttgcgacatcatcgcagcgaccaaaaccgctctatcatttggaacgactaggtttactcgaatattttgatgcgattattacggcggaggatgttacgcgaattaagccggaaccagatttatttttagaagcgttaagagcgcttaatgtaaaaccctcggaggcgcttattgtggaagactcgcgcaatggccttttggctgggaatagtgcgggtgtaaatgttcttgtcatcccaaatgaagtaacgaaacatagcgatttaacaccgaattatatggaacgagagtcgctggcggatgtagatttaacagaaataatagctaagtataataaataagggggcacgagcatgttattagaccgagtaactttggaagatattgaggtaaatttaaaggcaaaagattggcgtgaagccatccaaacatctgcgagacttctactagagcgaggtgccatcaaagaaagttatatcgacggaatgattcaaagtgtagaaaataatggaccatatatagtgattgccaaacatatcgccctagcacatacgcgaccagaatttggcgtcattcgcggcggtttaaccttcgcaacacttgctgacggcgtggattttgggagtgaaatgttcgacccagtgaaactaattattacgctcgcggcaacagattcagaaagccatttagaagtattgtcggagcttgctgaagtactcatggacgaggaaaaagtagctcatttgattgcagcgaactcggagcaggcattttacgaggagttaacaaaagaaggataataatttcactaaagaggtgaagaaatggaaaattatctttgtgttgatattggcggaactagtattaaatatgccaagtttaaccaagcaggcaagcggataggtgagcttatgtcttgtgcgacccctataagcgacggagcgaatcaaatcatgccggcgcttattcagattgtcgaacaggaaaaaacgggcatagcgggcgtctgtgttgcttcagcgggtgttgtagatcctctgaacggcaatatcatttacgctggctatacaattcccgaatacacaggaacagaaataaaagcagaattagagcaccgatttaaccttccgtgcgcagtagaaaatgacgtaaatgcggcctgtcttggcgagttttggttaggcggagcacggggacgaacgagcgtgctctgtttgacaattggtactggtatcggtggagcaatgcttttaaatgatgaactaataaatggctactcttttacagcgtgtgaagtgggctatatgcagctttcgcaaggaaaattccaagatgtggcttcaacaaaagcattaattaaacaagttgcctcgcgaaaaaatatcgaggaaaatgcgttaaatggtcgtcaaatcatggaatgggcttatagcggagatgcggttgtgctgaccgaaatagagcaatggattgagaatttagtcgaaggtgtagtaaacttaatctatattttcaacccagaagtgattgtgcttggtgggggattaatggaagaagagtcattcttcaaacctcgcctaaaaaaagctatttcagctaaattaatctcaccaatgttcgatacagcagatcttacttttgcaaagctgggaaatgaagcagggatgattggtgcgctttatcatttcttaaaccagaaagaggccaaaaaagatgacgattttaaatgaaattcagcaaaattacaatcgattaccgaataaagaaaagcaaatcgcaaaatatattttagaaaaaagtgatgaactcaagaatattaatattaaagagctagctgaagaaaccggcacatccatttcgacgataacgaggttttgtcgccacgtgcgttgtgatagttttgtggatttgaaaatgcgggttaatactgcagcaactatggttccgtcgcttggttatgatgacctttttgaagaggtttattcgttttaccataaagtgattgataatacggtgaagctgattgaaccagcgaagattcgtgaagtggtgcagtatattcaagaagccaaacgagtctatatttgcggcgtcggaagttcggggctcacagctgttgagatgtcacagcgacttattcggatggggttaaatgttattagtgtcaacgatccgcatatgatgattatcaccagctcaatcacaacaaaagaagatttcgttattggtatttccaattcaggtaatactccagagctagtcaccgcgctaaaaatcgctaagaaaaacaaaagtaaagtagccacatttaccagttttgaaaatagtgaaatgaccgaaatcagtgacgtaaccatcccggtttacaatactttattcgtaagtaaaagatattttgccaacagccagttttcgattatgtatgtgatggacattatttcgatgatgctactacaaaatgaatcttaccgcgaaaatatggaaaaaactatcaacaccgtaactgacgaatttcattaagataaattaggaaaatagatggaactggggaattttagcagctctgtctattttttcgcatttaaactgtagaataagcgtgtttttctctgacatttctgctaaaatagtttaagagacttgcggataagtaacatatttaaagaagcgcccaagattttccggaaaggaaggacccagatgcctttttcacgtttatttggaaaaaaagataagaatcaaatggatgatatagtagaagaaggagtacaacgcgtactagaacttcctatggataaaatattcccgaaccaattccaaccacggacagtatttgatcaagataaaattgatgagcttgctcgcactatccgaattcatggtgttattcagccgatagtggttagagaaatggagccggattattatgaaattattgcaggagagcgccgttttcgtgctgtactttctttgaaattggaaaaaatcccagcaattattcaaaatttagatgatgaagaagtagctgcgatagcgttaattgaaaacttgcaacgtgaagaattaacgcccattgaggaagcaaaagcatatcggagcttgctagacatgcaggacgtgacacaagaagctcttgcgcaacgtgtcgggaaaagtcagtctgccatcgcaaacaaaatgcgtcttctaaaactaccagaaactgtccaagaagccgttcttaacaaacaaatttcagagcgccatgctcgttctttactcgcattagaaacggaagaacagcaagtgagccttttacaagaaatagaagaaaatcactggaacgtcaaacaaaccgaagcaagaattcaagagattttaggcgtgaaaaaatcagtagctactaaaaaaaccaaaccaaaacgccaagctattagtcgtgacgtacgtatcgcgatgaatacgattaaacagtcggtcacaatggttaaagataacggaatggacctagatttcaccgaagaagagacagatgatttttatcaaattaccattcaaattcctaaaaagaaataagaggtgtagcagtgaggtttttgaagataattggacatgcagttggtgtcattagttgtttgatggtacttccatctttcgtaatagcgattacaagtgctattttaagttttaatccactatatattacctactttttcaccagcccctatgtccgagcagtagccgtagcagaagagtctggttggggaagtggcttcaacattctattaattaattacggggcatacctcatcgcgtttggctatactttctttgcgatagtgaagatttacagttggtaccaaatcgcgaaagaagcgaaaaaatagttacgaaccttgcttactaaagcagggtttttctttttaaatttaaaacaactcgatttgagtggaatataaactttcttacggttttacaaaaattagagaaaataagtgcaattttgagcagaaaaaagtacaatagaattaggtaaagttgtaaaggagggagtgattcactcaactctgggtggaatcacgaaacgaatggcaaagatcatttttgtgaaagacgaacaaaatgagttccaagcgtatgatttcttacaaaatttaattgtggaagaaccactaatggccactttagtatttcaaggcctgttacaactagaaacagcagaaacaagaaaacttagcactggtaagcaaattctccccgatgtccatttaattatcggtaaaagtcaagcttactcactgcaaacaactcgagtggaaacaactgtagaccaaccgattcaagaaatgaaagcacattttaaagataaaaattgtcgattaatttacttcactgcatttagtggagatgaaacatattattgcttcgttaaaggctattttaaagataaaaacccgttcactgatcaaatgagcgcttaccgcgaagaagtcaaacgcgtattcttacgtcgtatcgaagcagaaacaagtattggtcacccagactatcaattcgaaacactaaaaaatcaagctttagcaaatgaaggcattgctcattacttagatagtttttcagcaagcctaggtaaatatattttctctaagcgaatggagaagaaatggtcgcaactagatttggcgcttaaatcagatttatctcctgttattattggtcgtttagaagcaggggacccagatttaactcttagaatgtatcaaaaagtctgcacggttctaggtgttaagacaacattctctgtagattgaagatagaaaagtaatcagcttaggttggttgctttttttattttaaaatgtttcacgtgaaacatttctaggttttaaaaatatcattttcaccatttttaagctttcaaaatacgaatttcaatttatttttactttttgtaagactaaatgaaaatcttttggtagaatagaagataaaagaaccggaaatctcggtacaaaataagggttggtgaaaaagattgagcaaagtgattgcactagcaaaccaaaaaggtggggttggtaaaacgacatcatccgttaatttaagctctagcctagcttttttaggtaaaaaagtattactagtagatattgacccacaaggaaatgcgtcaagtggtgttggtgtaaataaaggtgaaatcgaacactgcatttatgatgtattggttgatgatgtggcgattcaagatgtgttacaaaaaacagatttagataatctaaatgttatcccagctacaattcaacttgcaggggctgaagtagagctagttccagctatctcacgtgaaattagattgaaaaaagcaatcgactcaattcgtgatgattatgactatgtaattattgattgtccgccatcacttgggcttttgactttaaatgctttaacagccgcagattctgttttaattcctgttcaatgtgagtattacgcgttagaaggtttaagccagttactaaatacaataagaatcgtccaaaagcatcttaatgaagatttacaaattgaaggtgttttactaacaatgcttgatgctagaacaaatctaggtattcaagtaatagaagaagtgaaaaaatatttccaaaacaaagtgtttaatacaatcattccacgtaatgttcgtttaagtgaagcacctagccacggaaaaccgattttgttgtacgatgcaaaatcaaaaggggcagaagtttatttagaattagcaaaggaagtggttgcacatggctaaaggtctaggtaaaggaattaatgcgctatttaacaatgtcgatacgaatgaagaaacagtacaaaatatcgctatcaaagaaattaagccaaatccatatcaaccacgtaaaatttttgatacgaaagcaatcaatgaattacgtgattccattaaaatccacggtgttttacagccaattattttaagaaatgctgaaaaaggatatgaaattgttgtaggtgaacgtagattccgtgcagcaaaagaagctaaactaaaagaaatcccagcagttgtacgtgatttaacagaagaagagatgatggagctttccgtcattgaaaacttacaacgtgaagatttatctccacttgaagaagctgaatcatatcagttccttatgaaaaaattgggcttaacgcaagccaaattagcagaacgcgttgggaaaagtagaccatatattgctaactttgtacgtcttttgaccttgcctgaagaagttcaagtaatgttacgcgacggctcattgtcagccggacatggccgagtgttgctaggtttgaaacttaagaaaaatattatcccaacagctaaaaaggctgcgactcaaggtttaacagttcgccaactggaagatgttgtgaacaacttgaacgaaaatgtttcacgtgaaacaattaagcctgccagagtgcctatttttattcgtgaaagtgaaagtcaattacgtgataaatttggtacggctgtctcgattaaacgtcgtgataaaaaaggtaaaattgaaattgaatttttatcagatgatgatttggatcgtattttagagattttagatattcagtttgatgatgaataggttgtgatgtttatggaaaaaaagcatttcgatttaaatgatatagtagaaatgaaaaagcctcatccttgtggtaccaatcgatttaagattattcgtatgggtatggatattcggattaagtgcgaaggttgcggacatagcgtcatgattcctcgacgtgaatttgaacgaaaagtaaagaaaattttagttaaggctgaagagtaatagagagcagacgatttatacagtcgtctgctctttttttaaagccttttagttgaagtttagtattttcttctttaaaatataaatagtatcatttaataattattataattaaaatgatatagtattttattggaggtatttacatatgacagagagaaaaaatttaacaacgaaccaaggcacgccagttggcgataaccaaaattcgatgactgcgggacttaaaggaccaactttattagaagattatgttctaattgagaaattagcgcattttgatagagaacgtgtaccggagcgagttgtgcatgctcgaggtgctggtgcgcacgggaaatttgttactaaaaaaagcatgaaaaaatatactatcgctaattttttacaagaagaagggacagaaacagaggtttttgctcgtttttcaacggtaattcatggtcagcattcaccagaaactttgcgtgatccgcgtggattctctgttaagttttatactgaagaaggaaattatgactttgtcggaaataacttgccggtattcttcattcgtgatgcgattaagtttccggatgttattcattctctgaaacctgatccacgcacgaatattcaagatggtaaccgctactgggatttctttagcttgagtcctgaagctacaactatgattatgtatttatttagtgatgaaggaactccggcttcttatcgcgaaatccgtggctctagtgttcatgcgtttaaatggattaatgaagaggggaaaactgtttacgtaaaactacgctgggtaccaaaagcaggaattgtgaacctttccaccgagcaggctgcgcaaattcaagcaaaagaatttaaccatgcgagccgtgatttgtatgaagcaattgaaaatggggactaccctgaatgggatttatatgtgcaagtgctagatccgaaagacttagacagctttgattttaacccattagatgcaacaaaagattggttcgaagacgttttcccatatgaacatgtagggacaatgacacttaatcgaaatccggataatatttttgcagagactgaatctgttgggtttaatccaggtgtacttgtacgcggaatgcttccttctgaggaccgtttacttcaagggagattgttctcttattccgatactcaaagacaccgcgtaggtcctaactacttgcaactgccaattaacagcccgaaagcacctgttgccaacaaccaacgtgatggctatatgccgtttaaacaacaaacgagttcaattaattacgagccaaatagttacgagactgaaccaaaagaaaatccagcttttattgaacaagaacaagaaattcgtggggatatttctggccgacttattgctgaaaaaccaaataactttggtcatgcaaaagaagtatgggatcgctattccgatgctgaacgtgcggcgcttgtgaaaaatattgttgatgattggtctggcgttcgcgatgatattaaaatccgcaatttgcgaaacttctaccaaatagaaccagaattcgctaatcgagtggctgatgggactggtattaatcttgaggaacatgtagcagatttaaaataagtaagcttaaaacgaaaatccttttagggttttcgttttttggtgggtggctttttatttgaaaaacctttataatatacgttagtgaaaaaatgtctatttgacgggcattttcaaaatgaagttaatgaaaaggagtttatatataatggcacttacagctggtattgtcgggcttcctaatgttgggaaatcgacactttttaatgcaatcacaaaagcaggagcagaggctgcgaattatccgtttgcaacgattgacccgaacgtaggaattgttgaagttcctgaccacagattaaacaaactaacggaacttgtaaaaccgaaaaaaaccgttccaactacttttgaatttacagacatagctggaattgtaaaaggtgctagtaaaggcgaaggacttggaaacaaattcttatctcatattcgccaagtggatgcaatttgccacgtaactcgttgttttgatgacgaaaacatcacccacgtagaaggccgagtagaccctctagatgatatttctactattaacttagaacttatcttagcggatttagaaacagtagagaagcgtattgggcgtgttgagaagctttctaaacaaaaagataaagatgcagttgctgaatataatgttttagttaaattacgcgaggctttcgaaaatgacaagccagctcgtgcaattgaatttaacgaagaagaagaaaaaatcgttcgtaaccttttcttgcttacaagaaagcctgttttatatgtagctaacgtaagtgaagaagacgtttctagcccggacgataacaaatatgtccaacaagtgcgtgaattcgctgcgagtgaaaactccgaagttatcgttgtttgtgctcgtgctgaagaagaaattgctgagttagaagatgaagacaagcttgagtttttagaagcgcttggaattgaagaatcaggcttagaccaattgattcgttccgcgtatactttacttggcttagcgacttacttcacagcaggtgttcaagaagttcgtgcttggactttcatcaaaggaatgaaagctccacaatgtgccggaatcatccatactgatttcgaacgtggattcattcgtgctgaagttgttgcctatgatgcattacttgaatatggttcagaacaggcagcaaaagaagctggtaaagtacgcttagaaggtaaagaatacgaaatgaaagatggagatgtcgttcatttccgctttaacgtttaatatgtttcacgtgaaacaatcttttgatgagcagatgcgtcaaaagattgtttttttatagaaatagtgcgattcttgtaatatttttcgcgaattctacaagctttataaacacctagagtgatataataaaagtatcttaaaacaataaaagttcgtttaggagtgtatatgatggctagtagttttcttgaggaagtagatcggttaataactttaagtggaataacctttcatgctagtggtactggaacacctgaattaattaaaatttaccaagatgctttagggaacgaatttccagagacatataagctttttttagaaaaatatgggacgttaacttttaatggtgtatctttttatggtatctctaaacgaggcttgagtgcagcttccataccagacgtcaaatttgcaacagagcaggcgcgtacatttggggatataaataaagagatgattatgataaaaaattcaggatatggttcgattttctcgatagacacttcaattattgggagtgagggcgagcctgtaatagttgaaactaacttatcattcaaagacaatacagaaaagaaagttgttgctaatagttttggcgaatttttactggaagaaatagaactatctttaactgatttggggtaagagtgtcaatttgcgaatgaaacggtaggttactttagtgatgctaaaattaagaactaaatgtttcatgtgaaacaattacagtataaagttgctttgtcaagagtttatttacttctatagagctcctcgcgataattaattcacaaaatatacaatttgccaagagcttaataatgctataattaactataaatttttattataggagtgttattttgatacaattaatggttatagcatttttaattgttcttcttgtcattatgccaaagaataacaaagaggaaagaacagcagcgcatttactaattgatagatatggtattcaagttgcgaagaaaaataatccagttcgtcaaatggctttgctggaaaaagctctaggtatttctacatatagaggtagccgtaaaaagacttttgcttttatcggtagtttctttgtagtagcatttattttaggctatctaacgtacttttttgcaataaatcaaaatttcccagctacaatcattgtaggtatttttttagttctgtttctaattgccggaacaataataatgtttgtaatagcgatccgccaaacatcatcattacgtacagatgcatgggctaaaatcctaaatacaatcgatccgcagtttccaattgaatttcttaacgaaaagaaatggcaaaaagccttccttgctcaaatggaaagcatggatggagaattagcataatcaaagaagtattagacttttaggagtttaatacttctttgattccccgggaaatatatagtatttttaaattgggatgacatttaaaataaaaccggcaccgcttcaagatagaaacggtgccggttttttgttagcgagtatttctagtagcaatttttatacaaaacaaggcaattagaagtagtactaggcaaaatgcgggaaatacaagcattgatcccgaatgcaaaacgccaatgaagaaagtacaaatactgacaattacataataacctaagcttaaaaaggcaccagccgtacctgcaacttcttggaatttcactagcgctaagcttaaacaatttggtaaagccatgccgattcctgccaagataatagagatgaatagaatataaaatacaacttggctcgttagcgggaaaatcgcgaccatactaagagcaagtgtgccgataagggctaataaaattccttctttgatgattttatgaggcgagttttgctttaggcgccagttcgatagcccagcacctaatatagttgaaacggccactgcgcaacccataaagccatactgactctgattaaaatgaaacctctcaataaaaatagtgggagcttcagagtagtaactaaacaatatcccattaaaaatgccaattagcaccccaaaagcaattgtatagcggtcaaatatcatttttttaccaattactaccattttctgcacactaaaggaggtagcgttcgctgtctttgtttctggtaatcgttttaagctccagaacagcaataccattcccataactactaaaaataaaaataccacgcgaaagccgtaatattgtccgataaacccaccaattaatggcccgattgccggtgaaaatgccaaagcggccgagatttttgcaaataagtggtggcgatcattgccgtggtagttgtcgcgcaaaatcgtctgtgttgtaacagaacccgtacttgccccaaatgcttgaacaaatcgaccgataaaaagcatagtaatattatttgaaagaaggcaaactaagcaaccaagaatatagatgaatatcccataattcattgctttgcgtcgtcctaaataatccgaactaacaccccaaaagaacacgccaactgcaaaagcaagaaagtaaatgcttaaagtcatctgagccaggtttaacgatatcccgtagcccttagcaatttcggttaaagaaggtgtataaatagtttcactaatttgtggaaaccctacaagacaaacaagtaatgccaaattgattttctttgtttcgatgtttttttccataaaaaactctcctgaataatttatttatctgggaaaaaaacatccttcacagggaaatggtgggaccatgatttttattcgctcataaaaaagcatgcagtcacccctttctattttaaacggagatggttccgttttttcgttaaagtttattgtagtatatataggcggaaagataaaggggtagttgatagtttggataaatatgcattgaaattaccgaaatttgagtgtttatgttaaaaatttaaattaaattcttatgaaaatgcgcttaaatcgaatcttttgtgactaattggttttacgatgattagaaaaatgaataatgagctaattcgaaaaaaatctattaaatttctactgcttttttacacaatctgagcaggaataataataaattgttttgatttaagctattaatgatgataataaggcatttcattaccattttggttatacattgtccattcatgatacattaaaagaatagaattaagataaggatgatgtgatgaaaaagtttctttccactattattttagtaacacttgtcattggtaatgtaatgtttttaaattttattactaatactttgtcgcatgattttctttttaaagggcaggcagaagtgcagattaaatataaagaggatgttcaggttttagcagttaataattctataaagcaattttcagaagcaaacaatatcaacatagctcagtatacatttttagatgaacgtgatttgaatatctatgcctctaattcccaatattcgccaaatataaagcttaaaaaaggagattatcccgataaaaaccgctttttggcgaatcgggaaagtggcgatgaaaaacaatcgggtgtgatttatcatccttctaagtattgggctttaaaggtttatgactttggacaaattaaaaatgtgggtctaagtgatactttttatgtaagtggtttagataaccaggatacttatcaggcttttttaaaggaatttgaacagtacggagaaataactacgaaaagtgttgacgtgagctggtggaaatatattaatatcccgttacttatgactttgcttttgtgttttgtcattttatttatttttacatattactatttaagatactccaaacagcggttatttgttaatcgtatatggggaaattctaagttagttacattaaagtctttgttcaataaaactattaaatttacattgtttagtgagttagtgattttggtggtttttgttggcatagttttagtaagagggctatccgcatactcagtagaaatagtatcgaagttgcttttgtttaatgtgcttttgttgatttttattctgtttccgacgtatttctttggattacttagaatacagaaaatcgatcaaccaaagtctgaccaacatatgcagtcggcaaaacaacatttggctatcaatttagttattaaatttgctctgctttgtgtatttattggtacgattatagcttcctatcaatcgctgcagatgttaaatacaagactagctaatatggacgtgtggaatgatgcaaagaacatttttaaagtaaatgtaggagttttacccgagaatattgaagacgatttaaaagctgatagaaaattaaacgataagttaaatgctttttataaagaaggaacagctaaaaaagagatgtttttaatgtattcgaaaaattttacgcgggttgaaaatgatacttttttatatgaaacctatttgaataagatctctgaaataaattcgcctgaagggaatagcgtagaggttgattttaattacttaaaattaaacccgattaaaagtgcacaagggcagaacgtagaaaatgaagcaataatcaatgataaagttttgaatattatagttcctacgagcaagaaggaattcgagaaagacataaaaaaagcttatcttgatcacttctattttcaaaaggtagaggtggctaatatgtataatgaggctttgaatcgtcctgttttagagctaagtaaggacgacttaagtatcaatattatttatgctcaaaataaccaagactatttttcctatgatagtagtgcgggggatttacgaacggggaacatcacagatccaatagcgattatctatacagggaacattgattcatctagtattggcgctcgtgtaacttcttctgtatattttgttgataaaacgaagggtgatgcgtttaatgctattttgccacttattaataattcaaatgcaagagaaattaccaatgtaacgagtgtttatcaagaagtatcaagcgaattaactgctttaaaatggcaaatttatcagcaatcgataggtacgattattttagcgataagctcctattcttttatgatattgcttgtattatcatattaccgggagaacttatataaacaacttatttaccatgtatttggatattcgttttggaaaagtagtaaatggtttattataagtaatttggccgtgtgtgctttttcgggagtcgttactttcattattactaaagaaccaattgctttatattttagtgtagttattctcctcatagagctatgtgttatttactttttaaaggaaaaagtaattaataaagattttaaagccatactaaaaggtgaaaaatatgattgaattagttaatgtcagtaaaaagatacaagataaattgattttggaaaaagtctctctttctattggagctggcgaatttattgcagtcgtcggcgagagtggtagtgggaagacaacgctgctaaatgttatcggacacctagattcaaaagatagtgggcaagttattattaacgagatggaatatcagacgaaaaaagaggttatgactctaaaaaaagaggtgttaggttttatattccaaaattatctattgatggaaaatgaaacagtgttagaaaacttatccattacaggtggggaaaatcgcaagctgatgatagagcatttggaagaagtaggaatggatgagagctatttagcaaaaaaagtataccaattaagtggtggagaaaaacaacggattgctattgtgcgcattttactcaaaccatttcaacttttacttgcggacgaaccaactggcaatttagatgataaaaacaaacaaaaaatcattgaattatttctagccttgaaaaagcaaggtaagactatcgtttgtgtcacgcatgacccggaaatatcaggaaaagcagatcgggtcatttatattgagaagggagaaataagatgaaaattatcggtatttctttagtaaatagccttttaatactcttagtggtacttattcataaagttttctttagagttttattgcttggatatgaaaacttgtttatctattggggctcctttgtattaatttattttattttgaatttaattacgaataggctgctgttatctagggcttaaataacaaaaatcccagctactaaactagtagctgggatttttttattcaaacaagaaatctaaaatcttatcaccaatttttttcttctcaccttgataagggaagcagtgcatgtgcatcgctggattgaagtttagctcgatgatagcgtgcttatcgcggtcaattgtttcacgtggaacaattatgtctacgccgcaaattttggcatcaaggacttgggtggcgcgaatagctatttctttgaagtagtcatccatttcttcggtatagtcaatgctgtcgccacctgtgctgacattggagttttcgcgaaggtagatgatttcttctgctttaggaatactatcccaagaaagattttgcatggatagcatgagagtttcttcaggaccagtacggattttttcaagtggttttaaatggtccgttccgcgcaatggatcggtgtttttttcttcaaccagttggcgcactgtatggattccgtcgccagttacgttagctggtacgcgttttaaaacagcctcaactttgtcgttaatgactaagaaacggaactcgtcgccaggaatgaactcctcgataatgacggagctatcgtaactgaatgcgatatttaaagcttcttggtaatcttctagcgtaaatttgtttttgaaaatgctgataccccaaccatagttggtagattttggtttaacgacgatttgcttatcttcaaataaagagaaagcttcaagtgcaagcgcttgatcgctaaaactatcgccaaatggtacgcgaatgccgtgctctgctagtacaagcttggtgacaactttattttccatcattaacacagatacatagttgtctttagaagttttgctggcttgtttcacatactccacatggtcgcctttttggaagcgaaggaagttttcggcccggtctaatacgtcaactttgataccgcgcgcgatggcgtctttccaaatgatttgtgtggaaagttccatgtcttctgcgccaacgagtttataagccagcgcctctgtttcttccatataagtttttgcttggtttaaatggaattcgacgtaaccttctttagctgattgtgcttgtacttgtgcagcaatcgttttttcagggtgtagcaggcgttctttttgtttttcaatgattgcttggaaatggttgtcgttaggaattagactttggatgaagtcgctcattttgtctaattctaaaagtcctgcatcagcaagggacatttcctcgttatcacagtttttaattgcgggctgtgcaaggccgtttaacgcgatattattttcgttttcgtcggctagttgttggttgttcgcgcatagctcacgatcttccgaaagcaaacctttaattaaaaataggtggataaaaataagttcatctttggaaattccgtttggttcaagtggatttaagtcaatcgagcgaatttctagatattccacaccatgcttagctaaactttcaacagtttgatcagtatgggcattttttaaacggattggattataaaattcgcgcatactttcgattttaccagcttcaatgtagttggaaatactcgaaatataagcgtcaaatgaattgtaatcgacgaaaagcgattctttgtttttatagccggcattactattgcgaagggaaatcccgcgatgaagcgctttgctaccatcgttcagtacttcttcgctgtttgtttttgtaaaatcagcgagataaactggactcgcgccagttaaataaataagcaaccaacgatttttcatgaaatatttagctacttttaaatataagcgatttttaaagtcgcgtttagattcgttaggatggctgatttcggcataaagcccgtcaattagcgcttcaggaaaagagaaattatagtgaattccggataataattggattttcttaccgtagcctttagccaagtgctcgcgatattttctatcagggctgtcgggcgttttgtattctgcaatgggaatatcttcttctgctggtaaaattggcggattgctagaaggccaaagcagttcgttttctgcgcgtagtgaaacgatattatgaagattttcaagccattcatatacagcgtcaatcgagtcggtcactggcgtaatcatttcaatttggctttccgaaaaatcggttttaatatatgggttatcttcttttgggccaaaaattgctggatgaggcgtaagagccaattttccatcagaagttacgcgtatattctctttttccaaaccaaaatgaccagaaaataagtatttccggagagcttcgttttctttaaaagaatcgagcatcgtcatatcaagttttatcatgttttcacctcaggggttttaaataagttcatatagagatattttaccgcaatatgtgaaattagtataataattgatttgtgatttacaatagtgcagaaaattttaaaaaatgtagaaaaaatactactgaacttatataatgagtgcaagaggtgaaaaaatggagattcggaacttaactaaaaagatggaagacaacttggttttgaaggatatttcatttggtttgaaagcaggagagataacagcacttataggaagaaatggtgttgggaaaacgacgcttttttccacaatgacgggaatttatttgcctgatgagggagatgtttttttagacgggaaaagtatttttgaacatcctgaagtcaagcagcagttgtttttcttggaagacaatatgaatcactttaatacatatagtgtacaaaccgtcgtcaagatttatcggaaaatttatccgacttttgatgaaacttttttcaatgatttaatgcgacaattcgaattaccaatgaaggcgaaattaatgtctttttcgaaaggacgaaaagctttatttttcattattttagctttttctttagatgttcgttatttattactagatgaacctatggatgggctagatattattattaaaaagcaaattttagcgattataaaagacacggtgaaaaagcgcgaaatgagcgtggtaattgcttctcaccgtttggatgaactagaagctattgccaatcgggtcattgttttaaaaggggctcatttggagcttgattattatttagatgacatgcgaaatgatgcagtgaaaatccaagtagcttttaaaacaaagaaaatacctgatttcgtaaaaaacaatgcgcaattattatatcgaaatgggagaatttacacgcttttagttacaaaaaatgccagtgaatttgttcggaaattgcgattagaggaaccagttttatttgaagaaatggctatttctatagaggatatttttacggttcatttagcgaatgacaagattgattattacgagatttaaagacatataaatgaggatgaagcgaataatgtttaatcgagggttatggtatcgagagtggcgtaatatgagatggatgcttctaggcgtagcgatattgttttttctggggattgctttagggctcgtttcagatgcagaacggtggcaaagtcaaaaggattattacgaatctagtgactttataaaacaacaaaaagaaaacccggaatttaaaacttctgatgaagaaatgaaaacgagtttaacagtggcttatttagctattccgatgtatacaaattttgtgcaagaagaatatgttgagtacatgccttttatgttttattttcaagtagagatgtttttcactttaattaaagcaagtgtatttattcttggagtgttagcggttatctttgagcgatatactcgggcaaatcgatttacggcatctttgccatataagcggacacatattattggcgttaaaatgattatggggatagctacgattacgcttagttatcttgtgtctattggaattggtttaacttactttttcaggcatataccaacagagtatatacagttagaaatggcgaaattttggacagatattgtgggtggtttatttacttatattcttatctttttagtcgctattttaattggactactaattggatcgcctattgcagctgctgtggtggcgtttggtgtaatgttactaccaaatgtgttgaatccaactttggataatctatataaatatatttggccacacggaggagaagctggtatgactaatctccttagatttgaggactatgtgaacgtcttttctccattttcttttgaatcggcctcgctcggagcggttatttttagcggggtgttaagcgtttgtatggtccttgctattttagttctatacaaaaaacaacatatcgagcgtaatggttatttatttgctttttcttgggtgaaatggccgtttcttatcttgttctcactgtttattggtatggcaacagctaatctagcggtggctgatacagaattaagttttattggttatctttcgtggggaatcggggcgacgattgctagttttgctttagcactttacattttgaacaaaatgcgcggacttttccaaatgtctaaaacgaattaaaaaaatagcttttttatagtaggtaagtccggtataatagagggtagaataagtgagggaggatttagcattgaccacagaaatgaataaaccgccagtagctgatttaaaggctagtttaacaaagcggaatttgcaatacgtaatggaagttgaaaagcatttgcgaggaactcattacgatgaagagcaacaagaaatcattatttacgaaatgtgtgaaaagattttagccgaacagaaaaaaggcataacagcgcgaaaattatttaatttaacaccaacagaatatgttgtttctttagatgtaaaagctgcaccagttgagcaaaatacagacaaatggtggcttgtacttgacggcgggctccttgtacttggagcgatgatgctgatttctggaattagtgcttatttccaaaaaaatgcacaaactttaggaattattgtcttagtaatcactgctgttgtcggtggttttgcaatgcttatcttacgtaaatacgcatctaatatgcgtgcaggccaaaaaggtggaacgataaaatacttactagtagcagttggagtcattgcggtatggatgtttgtaatgacaattgttcaagtgacaattcctccaaatatcaatgtagcgttaagtccgattgttaacacagttggtggtgcaattattattgccctacgtttctatgtgaagaaaaagaaaaatattccatccttataagaagatggacacggacaggtgacctaaattgcatattgcgaggtggtcacctgtttttatttcccgggaaatactgatacagatgaggtgaataaatttatgttttcgtatgaagtgattaggcaatttacagagacagaacaccatttataccgttacataatggacaatcgggacaaagttatgtttatgagagtgcgcgaactttcggaagtaacgcatgtttcgccagcttccatcgttcgttttactagaaaattgggctgtgagggcttctcggaatttaaagtgaagctaaaacaagaagcgacacgcgaggtaaagaaaaaaacagcagatacagtggaagttttagaggaattctttgaacggacaatgaatcgagattatgatcatgtactagacgcggcggcggaaattattaatgaagccgatttagtcgtttttttcggaatcggaacctcaggaattttagcagaatatggcagtcgttttttctccaatatgaagaagcgaactttttatattaaagatccattttatcctaacccgggagagcaatttaaaaataaagcagtgatgattatattatctgtgtctggtgagacggaccaggttcttgaacaggcgcaaaatatgcagcaatatggcagtcggattattagtatcaccaatacaagccataatacgcttgccgagctatctgatgtcaatatcccgtattacgtcacgcaagaaatggttgataagacgaatattacgacgcaaattccggtgttgtttttactagaagcgatggcgaagaaaaattataatcaagaacagctagaataataaaaagcgtgtagattttgtcgtctacacgcttttttattagcttattttcttgtatacgtgaacaaactcagtgacaacttctcttaatgtttctgttgtgatgagtaagtcttctgcatgaattagcaataactgaatttccactttttcaccggaagcttctttttggattagcttatgatgctcgtggtgaccgtttgcaagagtttcgctgccttcttgtagttttgcttccgcttcctcgaaattgccttcacgagccgcacgaagcccttctaagtaactgcttctcgcagaaccaacttgactaatcatgccaaaaattactgtttccatttcattcatgtctattttcctcctgtaaaaagtgatacactgcgccgagtaggccagcttggtttttatgtgttgctgtttcgataatcgtgtcacgcagcccaaagctcgccatatgatgctttagttccgtgataaaagtaggacgacttgtaattccgccaccaataaagatatgcgttggatcgaacaggtaaattaaattataaagtcccgtacaaattccggtataaaactcattaataagtcgttctgagataggatcatgcgcatcataatttgcaaaaatctcttctccagtaatttctttcaacggtcgtccggttagctgggcatattgtctgcgaagaacgagcatagtagtagtttcatttaatgtatattttccaggacggaaagcacctgggcgttcactaaacatataaccaaattcaccagcccggaaacgaccaccacgaactaatgcgccattagaaaaaatgccgccaccaatcccagttccgatagttaaacaaagaaaatcatccaaatcttgtccttttccaagccatttttcggcgagtagggcgcagttggcgtcattttcgatggcaacaggaagaccggtttctgcttcgagccattctttcaaattaaagttatcaaatctgcggatagcgccgcccattgtgatgagtccggtttttgggttgacgtagccgggtgcgctaacggcaatccctgtcacgtccgtattttcagcaagaaacagcttcatttctgctaaaatctggtcgccatcactcgcgattatttcggctgattttgttaatataatttcaccatgcggcaaaacgacccccattttaagggccgttccaccaatatcaaatgctgcaattttcattttgtcacatcctattgttccgttgaggctgttgcatttttatccattgcagcatcactcgcggcaattttgttagatacaagtacgaatggtagataaatgactgttgcgacggctagacagagtaagccgaccagaagcgcgagccagtttcctcctgtaccaaggaatggaatcagtggtcctggagttgtccaaggcacttgataggcgacaggtggaataagttttgttgagataaagaagtaaccaattaatgtattgattgctggtgtaatgatgaaaggaataaccataattgggtttaatacgattggtaaaccgaaaataacaggttcattgatgttgaaaatccctggtgcaagagaaagtttcgcaatatcgcggtagtctgcacgacgagaagcgataaagatagcaatcagtaaacctagagtcataccagatccaccatagtttgcaaatccgtcatttaaaccagcccatgttgcagggtatggagctccccaagcagagccgtgttgtgctacgtaagataagttatctaagtttggttcagtgaagatggtgtcacgaatagccgcaactgtgttaggtccgtgaataccaagaacccaaagtaagttagaaacaagtccaatgataattacagagaatacgttagttcccatgtctttaagtggcgcttgaataactgtgtaaacaaggtcatttaaaccttcaggagcgattaatgtgattaagtagttaattacagagaaaagaatcgtgatgataataactggaattaatactttaaaagaacgagcaactgctggtggtacttggtcaggcattttaatcattaaacgaggggatctagctagacgactaaatacttccccagtaataatcgctacgataatagcaacgaaaagcccttgtgcacctaagaatttgattgtcatgtaagatgcgttatcaacaactgtgtaaggcgtatagacgataaagaatgcacctatcgaggtaagcccacagagcaaatcatcctgtttaaagaagatggcgagattccgtgcgactaagaatacaatcagaatcgccataatattggtagaaccttgcattaccggcgaaaatacagcctgtgcatcggctaaattagggaagattttccctaggaataaaatttttgcaataaagccatctggtgataacactgcgaagttaatcaaagtgataattgaaccggccataattaatgggaaaactaaaataaatgcatcacgaattgctgcaatatggcgttgtgagttcaatttattcgctactggtactaaaacacgttccatgccgtgttcgaattttgacattatactcattttaaaacctccctatttttaaatgaaaattccttacccaatctccgcgaaagctttttcaagaacggctttcccatttaacataccataatctttcatatcaattacaataaccggaatacgtccctgtacgagttcgtctacttgcggtttttggtaacggacttgaggtccaagcataacaatatccattttatctaccacgctgctagcttctgatactggcaatgcttcaatttcaatttcttccccaatagaggttgcgtgcgctttcattttagttacgagtaaacttgtcgacattccggccgcacatacaagtaatatttttttcattaaaatttccctcccaaaatggttgaagcagagagagaacaaggcttatttgccctgttcttctactaaattagctccgtttgcttcgattgtctttttataccagtaaaaactgtcttttttatagcgttttaattctttttcatcgttttcgtcgcggtcaacatatacgaaaccgtaacgtttttggtagccgtttagccagcttagtaaatctgtgaagctccaagtgcagtaacctagcatttctacaccgtcagtaattgcttcttggattgctagagcatgggcgcgaatgtattcaatccggtactcatcatggattttgtggtcttccgtcaagctatcatactcaccaagaccattttctgtaatcatgattggtaatttatagcggttagtaattctacgtaagccaatgcgcaagccagttggatcaatgtcccagtcccaattcgttttttctaagtatggattattggtgtttttgtataaccccggtacaccagtttcctcggaagtgcctttttcgccagttgtattcattttcccagaaccaacgccgtctttcccattaaacgcatgagtcattgagcggtaatagttaactcccatgaaatcaggttttccttttttcagaagctccgtatcgcctggtaagatttccggtgcaagaccgtgctcttccagccagttccaagtagcggtaggatattcaccccatgtgtaaacatccatccagaaatgggcattgaattcttcggagttttcagaagctaacacgttcgcggggttggcatcgatggagtaacttggtccgtaagcaaaacttggtccaatttttccagaaatacctagctcgcggaatttagcaattgcagaagcattcgccaagttcgcattgtgatttgccgcaaacatacgcttgtcgtcagaaacgccaggtgggtgatacgctaatttgtaaccgtgtgagataaatacgttttgttcattaagtgttacccagtatttaactcggccgttaaagcgttcgaatagaagggcggagtagttagtgaaatcttcaataacttggcgcgactcccatccaccatattcgtcttgcagcccttgcggaatatcccagtggtaaagtgtaacaactggctcaattccataagaaagaagttcatcaatcaaattatcatagaattttagtccagcttcattaacttccccgttaccatgcgggataacgcgactccatgcgacagagaaacgatatgcttttaggccctgttcagccattagcgcgacatcttctttataacgatgataattatccaccgctacgtctccgtttgtttctttgaatgttgttccaggaatacgaacaaattcatcccatacagatggtcctttgccatcttcatcccaggcaccttctacttggtacgctgcagaagctgatccccatagaaaatcttttgggaaaggtttcaacttattatgttccattatggcacctccaaaaattatgtgcgattagtctgttttttgttttgcttgccttattaatgtaaacggtttcgactaattggtaaatagattttgatgctttgggttcgtgtttcatatcaatggtataagtttctgagttgaaacgctgtgtttcgtgcatgtgattgggagaacaattgacatttgaggcagcatcccttattctatatgtattaatgaaaagaggtgagatgacatgtttcttttgaatgcgcgaactagtatagctaaatttttgtatattgtccgtgcaattttttccggtattgcagttacattggtgaagtctgcccaaaaaactgtataactagaaaaaatgagagaagcatggagtcacgcaatcggtttgtatagtgctaaattagtattatacttataattggcgtcgggcgcttgtctgacgcttttttgttgtctgaaaaaatgtttcacgtgaaacattttgccatgcttccttggataaatggaggataaaatgacaatagttgcaatgaatgatgtagttaaaagttttaccggagatattattttagagaaagtatctcttcaattagaggaaggcgagcgtgtcggtttaattggtcgtaatggcgaagggaaaagtactattttgaagattttaaaaggaactgagggcgttgatagcgggattgtaaccagcaaaaagggtgcgaaaatcgggctgttagagcaattatccacggtggatcctaatataatagtagaacaatatttacgaactagttttggcgagttagaggatttggaaaaagaattacgagcattagaagaagaaatggcaacaaattcaagcgaaaaattaatgaaccgctacggagataaaatggctttgtttggtgagctcggtggatatgaaatggacgctaacttgagcaaggtggtcaacggacttggtattggagcattactgcctcaaaaatggggcgatttaagtggcggtgagaaaacaaaagcagcattagcccatttattattacagaaaacggacttgttacttttggatgagccaacaaaccatttggatttaatggcagtggaatggttgacgacttttttacaacattatgctggaactgtgttggtagtttctcatgatcgctactttttagatgaagtagtccagaaaatggtagagctcgagaaccgcgagttaatcgtttatcatacgaatttttccggatatttaaaagaacgggaagaacgactattacgcgaattccaagactataaagatcaacaaaagaaaatcaaaaaaatgcagcaagccataaaaagattgcgccagtgggctatgcaagccaatccgccgaacgacgccatgttccgccgggcaaaaaatatggaacgagcattagaacggatggaaaaagtgaagcgccctgtattaacacaaaaacaaatgcaattacaatttgacgaagctagcagaagtggacaagatgtagttgtgatggagaatttaaataaatcttttggagaaaaagaaattgtgcagggtgtttctttacaaattagacaaggcgagcgagtggcgattattggtgaaaatggtgccggaaaatccactttattaaaaataatagaaggaaaagtggagccggataacggaatggtgaaggtcggagcaagtgtgaaaatcgcctcgctgtcacaacaaatggaagagttgaatgaagaaatgacagtgcttgaagcgtttcgagataaggtggcagtgacagagggagaagcaaggcaaatgctagctggcttcatgttttacggggagatggttttccgaaaagtggcgaatattagcggcggcgagcgaatgcgacttagattagcccaatttattaatatgcctgtgaatacacttattcttgatgaaccgaccaaccacttggatattgcgtctcgtgaagtgttggaagaagcaatccggacttttaccgggacaatcattactgtgtcacatgatcgttattttattgatcagctctgttctaaagtaatttggctcgaaaataagcaattaacagtgtatgaaggtcactacagctatgccattagtaaacgaggataatcgccttgctggaaatcgctctccaaataaattagaatgaagaaaagaggtgatggtatggatataacagttgtaaaaggcgatattacagaacaaaatgtggacgtcattgtgaacgctgctaatccaggactcctaggtggaggcggagtggatggtgctatccatcaagcagctggtcctgatttattaaaagaatgccaagaggttattaatcgcattggttcttgtccagcgggtgaagcagtaatcacttctgcaggtgatttaaaagcgcattttatcattcatgcagtgggaccgatttggaaagacggtgagcaccaagaagctaacaaattagcatcttgttactggaaagctttagatttagcggctggaaaagacttaacttcgattgcttttcctaatatttctacaggtgtatatggttttcctaaaaaactagcggcagaagtagcgctttataccgttcgcaaatgggcggaagaagagtatgactcaagtataaaagaagtacgctttgtttgttttgacgaagaaaatctaacattatacaacaaattaataaacagtgaagtcgtttaagataacattcttagacggctttttaaaatgtttcacgtgaaacattttttactatattttctgaataaaacaacaacggaaaaccttcttgacatagcccctagcttcttgtaacatcatattcaataactaaaaatatacattggctatttcagcatgattatagaagacaagtcgcatgatgtggatattttccaccattttttctttatacaaataaagagaagatgatgcgttttttctatataaaaaaagctagtaccaataaaaaaggagtgtttgcgacccatgtgggaaacaaaatttgcaaaagaaggcttaacatttgatgatgttttacttgttccagcgaaatcggacgtattaccaaatgatgtagatttaagtgtagaaatggctccatcactcaaattaaatgtaccaatttggagtgccggaatggacacgattacggaagctaaaatggcgattgcaattgcgcgccaaggcggaatcggtgttgttcataaaaatatgagtattgaacaacaagcagaagaaatcgagaaagttaaacgctccgaaagcggcgttattattgatccattttatctgactccagaccaccaagtttttgctgcagagcatttgatgggtaaatatcgtatctcaggtgttccaatcgtcaataacgagaaggagcgcaaactagttgggattttaaccaaccgtgatttacgttttatttcagactactctacagttattaaagatgttatgaccaaagaaaacctagtgacagcaccagttggcactactttaaaacaagctgagcagattttgcaaaaacaccgcatcgagaaattaccacttgttgacgaggcgggcatcctaaaaggtctcatcactattaaagatattgaaaaagtaattgaattcccgaactctgccaaagacaaacatggtagactacttgcagcagctgctgttgggattacaaatgatacttttgttcgtgttgaaaaattaatcgaagctggtgtagatgcgattgtaattgatactgcgcacggacattcagcaggcgttattaataaaatatctgaaatccgtcaaacttttaaagatgtagtaattgttgccggaaacgttgcaacagctgaaggagcacgtgctctatttgaagttggcgtggatattgttaaagttggtattggtcctggttcgatctgtacgacacgtgttgttgcaggtgttggggtaccacaaatcacagctatttatgattgcgcgactgttgcacgcgaatttggtaaaacgattatcgctgatggcggtattaaatactctggcgacatcgtaaaagcgttggctgctggaggaaatgcagttatgctaggaagtatgctcgctggaacagatgaaagccctggtgaaacagaaattttccaaggtcgtcaattcaaaacttatcgtggtatgggtagtttggcagctatggagcacggttctaaagatcgttatttccaagctgatgcaaaaaaacttgttcctgaaggtatcgaagggcgtgttccttacaaaggttccgtggcagatattatcttccaattagttggcggtattcgttcaggcatgggctacactggctcacctgatttaagacatcttcgtgaagaggcggcgttcgttcgtatgactggtgccggactacgcgagagtcacccacatgatattcaaattacaaaagaagcaccgaactatagcatttcttaaggtcgaaaaagcagaaatctcttccaaaagaggtttctgctttttaatttcttctataaaataagaaaacgcccagaaaaaacgaatttccttaaaaagcttcaattaagttcttaaaaccgctatactgtttctatagaggaggcgtgaaaaaagataatgatagaacaagcaagagctattttacagcaaaattttggttatcaagactttcgagatggacagatagatgttatatcgaaactttcagctggtgaagatacgctcgcaatcatgccaactggcggcgggaagtcactttgttaccaaataccagcacttctttttgacggtttaaccattgtcgtttctccgctaatttcacttatgaaggatcaagtagatgcgctagtctcagatggcattgcagctacttttattaatagtacacttactaatagagaaatagatattcggttagatgctgcattttctggagagctaaagatgctttatattgctccagaacgaattgaaacgccaggttttcagcgattaatcgagcaagtgcctatttcgttatttgcaattgatgaagcgcactgtatctctcagtggggtcatgactttagaccaagttatctgagtctttgcgatagtttagacaaaatgactcggcgtccgcttgttatcgcgcttactgctacagcaactcaagctgtttcagacgatatttgccgtcttttaaaaataaaaccaaattctgttatcaaaactggattttccagagataatttagcatttcaagtagtaaaaggtcaggataaagacaagtatttaattgattatttaacgaaaaattcgacggaatcaggtattatttatgcgtctacacgtaaagaagtagagcggatacacagtttcttgcttaaaaaaggcgtggaatctggtatgtatcacggcggaatgactgatatagctcgaaaagattggcaggagaagtttctatatgatgatattcgtgtaattgtagcaacgaatgcttttggaatgggcattaacaaatccaatgtgcgctttgtcattcattataatattccccgcaatatcgaggcgtattatcaagaagcaggcagggctggtcgagacggcgttccaagcgattgtattctgctcttttctccacaagatagtcgtattcaacagtttttaattgagcaatccgaaatggatgatgaacgtaaacaaaatgaattcgctaagttacgccaaatgacgggttatggttatacagaaatttgtttgcagaagtatatcgttcagtattttggtgacgacgaggaaaactgcgggaagtgtagcaattgtctggatacgcgagagacgacagacattacaattttagcgcaacaagttttttcatgtataaaaagaatgggcgaacgtttcggaaaagtattaattgccaaggttctaacgggttctgctgaccaaaaagtgaaagactggcgatttgaagaacttagcacctatggattaatgaaagatgcatcgcaaaaagatgtattgcaactaatcgattaccttacagcagaaaaatatttacagcctacagatagtcaatttccttcgcttaaacttactgatcgagcaatatctgtactacgaggcgagctaaaggtagagcgtaaacaagcaaaacgtgccgaaaaagttaaaatggatgtaagtagtgatcttttcgaaaaattacgagaggtcagacgcgaactagcagcgaaacacaaagtaccgccttatatcattttttcagacgaaaccttacgtgaaatgtgtgcgtatatgccacaaacggaagatgcgctgcttgaagttaaagggattggtgcgatgaaacgtgataaatatggtgctgaattcttggcagtattgcaacaagaggcagcaaaataagatagaagagagggtttgacagatgacaaaaacactagtgctggcagagaaaccgtctgtcggtaaagatataggccgcgtgctcggggctaagcaaggaaaaaatggctatttagaaggcggaaaatacgtagtaacatgggcgttaggacacttagtaacactggccgatccagaacgctacgacccaaaatacaagaattggaacatggaagacttaccaatgcttccagaaaaaatgaaactagaaccaattaaacaaacaagaaagcaatatgaaacagttaaaaaattgatgaaccgtactgatataactaccattgttattgcaacagatgcagggcgagaaggagaactagtagctcgctggattattgattatgcgaaaatcaaaaaacctttaaaaagattatggatttcctctgtaacagataaggcgatacgagaaggatttgaacatttaaaaccaggaaatgcttacgaaaacctgtatcattctgctgtggcgcgctctgaggctgactgggtagtggggattaatgctacacgcgcgttaacaaccaaatacaatgcacaactatcctgtggtcgcgtgcaaacacccacgcttgcaatgattcagcatcgtgaagaagaaatacgtaactttaaaccgcgagaatactacagaattaccgcgttaacagagcaagaaagtttcacgtggaacaatggacaaacttttgataaggatttagctgaaaaactagtaaaatctttacaaggcgaaacggcgttaattacagacgttgctatgaaagaaaagaaaactttttcacccgggctatatgatttaaccgaattgcaacgtgatgccaataatagatatgatttttcagcgaaagaaacgcttaacattatgcaagccttgtacgaacggcataaggtattaacttatccgcgaactgattcacgctttatttcaactgatattgtccctactctaaaagagcgtttagaagcttgtggtgtgggcgaaaatgccaaagctgcccgccaaatcagtggtaaaccaattaaagcaaataaatcgtttgtagataacagcaaagtaagtgaccatcatgccattatcccgaccgagcaacccgtttcactcggagatttaagcgataaagaacggaaaatttatgatttggtagttaaacgtttcttagcagtactttcggacccttatatttatgaagaaacctctgtaaaagcaaaaatcggtcaagaagactttactttaaaaggtaaggttgttaagtccctaggctggaaaagcatatacggcgaggcgcgtgaacccgatcaactgactaaaatgaaaaaaggcgacaaaattcctgttaagcgtgtaaatttagaaacaggaaaaacaaagccgccagcaagatttaatgaagcaactttactgtcagcaatggaaaatccgtcaaaatatatggaaacaacgagtaaagcactggccaagactcttggtgaaacaggtggtcttggaacagttgctacacgagcagacatcattgaaaaacttttcaatagttttgccttagaaaaacaaggcaaggaaattcacattacatctaaaggacggcaattactcgaattagttccagaagatttaaaatcccctgaactaactgcgcgatgggagcaaaagctatccaaaatcgcaaaaggagaactagattatcgtaaatttactgcggaaatgcgggattatgctaaaaaagcagtaacagaaataaagcaaaacgataaaaaattccgtcatgataacattacatcacaaaaatgtccggattgcggcaagccaatgctaaaagtgaaaggcaagcgcggaacgatgctcgtttgtcaggaccgtgaatgtggtcatcgtgaatcagtttcaagaacgactaatgcgcgctgtccaaactgccataaacgtatggaaatgcgcggtgaaggggataaacaaatttttgtatgtgtttgcggacatcgtgaaaagctaaccgccttccaagagcgccgtaataaacagaaaaacaaaaatgtatccaaaacagatgtagccaagtttatgaaaaaacaaaacaagcaagatgatgaaccttttaacaacccaatggccgaagcattagcaaaattaaagctagataaataagcgcaaacaaagcgacccactcatatcgagtgggtcgctttgtttgacatagtctgctgtatacgaaacaataaaatggcaatcaatattaaaaaggagatgtttcacgtgaaacataatcaattaataatagaaacagatattccagccaaaatgcgagatggggtgactctctacgcagatatatatcgtccagccgatgaaggaaagtacccagttttgcttacaagattaccttatagcaaatcatatgggctccattttctccgtcctaatattttggcggcgcaaggttatattgtgatagttcaagatgttcgtggtagatacacatcagaaggcgaatttgtaccttacatagcagaagtagatgatggatatgacacaattgaatgggcagcaactttgccttattctaatggggatgtcggaatgttcgggttgtcgtactatggttatacgcaaatattggctgcgataagcggtaataagcatctaaaaactattgctccaattatggcgcaaaatagtatgactgacgtgtttaacgaccatgacggtgcgctcgagcttggtatgtgggaaacgtggaatttagaatcaatgcttccaaacatgctgactcgcaaatacagtacacgtgaagaacaagaacaagcagcaaatacattaatgaaaaacttagataatctcgaatcattatataaatttaaaccatacaaagactggccagtaattgggcgggaagaaatgccttatttttcagagttacttaattatgaaccaacccacaatcactggcaaaaaatcgatgcgaaaagcaattacgataaaatcaatgttccagggcttcatgtagccggttggtacgactgctttttagataaaacgatcgctaatttccaaaatggtcacagccgtaagcttggagataaattagtcatcggaccatggactcatgccaattttgcacaaatgattggagatagagactttggcatagctgctactaaatggggcgaggcaagtatgcatgcaagacatatagaatggtttaatcactggctgaaacaagagccactacctgaaatggcagcagttaattattttgtcatgggcttaaacgattggaaaacagctgaaacttggccacccgaaaatacagctatgacaccactttattttaaaacaggcacagtaagcgcagaattcactccgccaaccaaagagtcaaaagcgaaattcagttatgacccggaaaatccggtgccttcaaacggcggaggaactttacacaaagagctacatgcggatggtcccagagatcagcaacacctagagttgcgcaacgatattctttgttattcaactgctccacttgaagagtcgctagaaattacaggaccaatccaagtaaaactatgggcgaaaacagatgcgccaaacactgatttcaccgctaaattagtcgatgttttcccggatgggacagcctttaacctagcagacggcattatccgggctaacaaacaacacggcgataatgtgcaaaacaaaattaatgaatatacaattgatttatgggcaacaagtaatctttttgaaaaagggcaccaaattcgcgttgaaatttcttcaagcaacttccctagattcgatccaaacccaaatacgggcggtagttttattaattcaaccgaaagccaaattgcgagccaaacgatttatcatagtcctgaatttccgtcacatattcttctgccaatcgttcgctagaaaatttggtttttgggcgaaaagttttatatacggcactactaaatcatggtaaaatatgaaagtatccgtcaaaaaaatgaaacttattcaaaaagggaattttaaaataggtttcttgattaaaatatagataaaatgagtcaataatttgctcaaatgaaggagaagttgcagtgaaaaacataattaaaaaaacagggatcgtaatcatggcagcatcccttgcagtaagtggctttttagtaagtccgaaagcagcacaagccgcggaagcaccaaatgtaaatgcaaacgcagcaatcgcgattgaagagagtactggtaaaattttatattcaaaagatgctgataagctaatgggaattgcatccatgacgaaaatgatggatgaatacttattacttgaagctattgataaaggacaattgaaatgggacgataaagtaactatttctgaatatgcctacaaagtttcccaagacacttccttatcgaacgttccacttagattaggtgaagagtatagtgttcaagaattatatgaagctatggcgatttattccgcgaatggggctgcaattgccatttctgaaaaaatagcgggttctgaaaaagaatttgttgatttaatgaacaaaaaagcagaagaattaaaactaggcgatcaccaatttgttaactcgactggacttaacaatgaagatttaaaaggtggccagcaagtgggcggtccaacagatgagaacaagatgacggctcgcgggatggcaaagcttgcgaaacacttaattgatgattatcctgatgttcttaaaacagctagtacaacgaaaaaagaattccgtaaaggcacatctgaccaaattgacatgtcgaactggaactggttactaccaggattaatttacggtcgtaaaggtgtcgatggcttgaaaaccggaactactgattacgctggaatgtgtttgactgcaacagctgtacaagacggcatgcgagttgttaccgtggtacttcatgctaacggcggtggtaaaggtgaacatacgagtgctcgttttgacgaaacaaacaaaatgctagattatgcatttaacaatttcaaagtaaaagaagtacaaaaagcaggctcgaaagtgaaaattccttctacaatcgctgtagataaaggtaaggaagacacagttggacttatcacaaaagatgctgtgaagctagttgtaccaaaaaacgacaatgaacctaaattaagcactaaagttaaactgaaagaaaaaaccttagaagcaccagttaaaaagaatacggaagttggcgaaatggaagtatccttaaaagatggcgacaaattaggttatcttgatggaacacaaacagaaaatattaaagtactaactgctggcgatgtcgaaaaggcaaactggtttgcactttccgctcaagcagtaggttctttctttaaaggcattggaagctacgtttctaatggtgtgcaaggttggtttaattaacataaaaaagtcgatttccttaactaggaaatcgactttttttttatttgtttgatagtctttataaaaccataataagaaaaaaacaatactaatagtaaaaaatataattggcactataataagctttgtgcccagtaaactctgattgacgctcccatccataaaaccagattgaatcaataaccctcttacagcccctaatacctggatgacaaaaagtaaaataagaccaataaaaccacttctaacaaaaagattaaaattcatatgtatgttcacctctgtttttatttttctgttctaaattacgttaacataaaattactgagatgaaaatgaaaagaagactttgtatgctagaaaaaaccattcaaaactaagaaactgatgaaataaaaaaagaagttcccaatgtttaacatttgagaacttccttttttctatttatttcagaccataaaaagcgtctatctactcaataacaaactgattatgataaagctcagaataaaatccttccgccttcatcagctcatcatgattaccttgttcaatcacttcaccttgatgtagcacgacgatatggtcggcatcaaggatagtttttaaacgatgggcaatgacgaaactagttctaccggagataacgttgtccatagctttttggatgcggctttcggttacggtatctacattacttgtcgcttcatctagaattagtagagaagggttcgtaataatagttctcgcaatactcataagctgcttttgaccaacactgaaaatattgttttcatcactgatttctgtttcataacctttttctaggttcataatgaagtcatggatgttagcttgtttcgcagcgttaatcacttcctcgtcgcttgcttccggcttaccgaaaacaatgttatcgcgaatggttcctgtaaatagaacggaatcttgcaacacgataccaacttgtttacgaagagaatcaaggcgaatgtcgcggatgtcgatatcatcaaagagaatcgcaccacggtcgacattatagaagcggttaagaaggttcataacagttgtcttaccagaaccagttggtccaacaagcgccaccattttacctttacttacatcaattgaaacgtcttttagaactggtttttcagggtcataagcgaaatcaacatgatctagtttaacacctttattaataccatcaattgtttgtaagttctcgcgttcaacttcttcttcctctgcaaatacttcactaacacgacgcgcaccagtgattgctagttgtagcaagctgtactgggacgaaatttgtgttagtggcatatagaattgttgtgaatattgaacgaacataacgattaaaccaagagcggctgtgcgttcaaggtcgccgtttagagctaaccatccaccgaagaagataacgatagctgtatttaataatgaaataccttgcatcattggaaaaagtaaaccagagtaaacttgacctttataagttgcgtttttaacaacattattttgtttaacaaagccctcaatagtttcttcttctaagccatttgtgataataattttttgaccagaaattttttcgtcaatgtagccgttcaaaacacctaattcatcttgttgaatatcaacgaatttgcgggcttttcgaatgattatagtcgcaataataatcgcaaatggagcagatattaaagtaacaaaggctagttccacattttgctggaacatcatgatgatgacaccaatcattaatgcaatgtttgatagcacttgaatcaatgcttggttgagtgtgttagaaatgttatccaagtcactagtgaagcgactcagcatttcgccatcattgcggctatcgaagaaacgaatcgatagtttttccatcttgcggaaaagccctatacgcattctgttcgtcgatttaccagctacccctgtcataatgatactttggataaaagtggcagcagcgagcagtacgtagcagagaatcagcatccaaatgatatggatgaagtcgctcttgtcatcaacacctgttcgcattaaacgaacaacataatcaccaagctcttgaacagcattaccaatatattgtggtgcttttacttgaaggtatgtcgcaaaaactacagcaattaaaatgacaaaaagttgaggcttataaccccgcagatagtgccagaaaaagcggctaatttgtttaaactctttcattatgcggttacctccttgcctttttgagtgtcgtaaatttcacggtaagtttcattttctttcagaagttctttgtgggaaccaacgccaacgagtttaccttgatcgagcacgagaattttatctgcttgaataacagaagagattttttgtgcaatgatgaaagtagttgtgtcgtctagctctttattaagtgcttctttgactaatttctcggattttgcatcaagggcacttgtgctgtcatcaagaattagtactttcggcgaaccgataactccgcgtgtaatggatagacgttgtttttgtccaccagagaagttattaccgcgctcagaaacaggagcttcataaagttttgcttgtttatcaataaattctttcgcttgtgctattttacttgcatgttccatttcatcgattgtcgcgtcttttttaccatgacgtaaattgtctgcgattgttcctgagaaaaggattgcgcgttggagcacgaaggaaacggtgctacgaagtgttttcttattgatgtcttttaggttagtaccaccaataataacttcaccttcagttggatcataaaggcgtggaattagctgggcaagagtcgatttaccggaacctgttgcgccaacaataccgaccatttcaccaacattcgctttaaaagaaatatcttcaagtgcaggtgtatcgtcaccatcatatttgaaactaacgttacggaactcaacagtaccttctaaatcttgttcaggcgcattttcattgtatgtaatatctggttctgtttcgagaacttcagtaatacgtttcaaggaaataagcgcacgagaggccatcatcattagcataccgccgataataattgccatcatgatttgcattaagtagttcatgaatgatgcgatagccccgataacttctgggttttcagcagccatgtcacctacgaagaaaatagaaacaacaattgctaagttagaaacgagcataaatgcaggaatcatgacagaaaaaagagttcctacaatgatagtgtgacgagttagtttgtcactgacagttgtgaaacgtccgatttcgttatcttcttgaacaaaagatttaacaacgcgcattccggcaaggttttcttttgcgatagaatttacgcggtcaattaacttctggataatcgcaaagtgtttacccatagagccaaatgtgaagacaacaatcagcactacgagtacaacaagcacaataattacccaccataattcaggtagagtaaacatcgctaaaataaatgccccgataaacataatcggaattcttgttagcgactgtagtgaaagcatcactaaattttgtacttgggtaatatcgtttgtttgtcgaacaactagattacctgtcgaaagtttttcaatgttactaaatgaaaatgtttggattttacggaaactagattcacgaatatctgcgccgacaccttgagcgactttggcagaaagaatcgtgtttagaatcccagcgataaggccaactgcggcaataccgattagaagtgcgcctatggaagaaatttcatccatattatccttcatgatggcgtctaggacttgctgaagtaattttggttgccatagttgtgagataaccatgactactacaaacaaagtagataatgttgcttgtagcttgtaatttttaagatgatgaaacaatactttcatgattttcctcccttggaaaacggaaataaagacgtgcgaacacatattctaatatagtttgtgaaaatttgcaagtaattttttcactaattctaaatatggcgaaaatatggcaaatatactgtcgaaaatcactttttaattgtgaaaaaacctgttgattattgtttgatttctacttctacaaatcctcttacactatttattaaccacacaaagtcagcctcgaaaaggtcttttttcattagtgttttttcggaaattttgttttttgctaataaatctgctctcatggtacctgggagaagccctgaactcactggtggtgtgaaaaaacagccttttatgcctagaactatattcccggtagtaaattctgttagctcgcctcgctcattccaaagcaatgtctcctcggtttcagtgcttttcatgtcttcataaacagatctattagtggttttatgataaaggaataaatcatcagttgagacgggactttttgccagttgcgcggttatttgctgattttgcgtacttatttcggctagttctaaaaggtgcgtgccatttggatggagtaaaaatcttaatttatatgttccagctggattgtttcgcgctgtttcctgccatagctccacaattttttcaccattaaaaggaaaaccgaaaaaatttgcgcttgtttgaagccgttttagatgaaagtctatccgggaaagcgctccgttttcaaggcgtaaacattcaattaaagaaaacttggttgctttttctaaaatggctgattttgcatgaatctcggaaaattcgctctcggcatcagaatcccaaacaataccgccaccaacaccataagttgctttattatctgcaatggaaatcgttcgaattggcacattaaaaatcgcatttccattaggttctaggaatccaatcgcgccacagtatacgcctcgaggtgaatcttctagctctgaaataatttccattgtccgggcttttggggcgccagttattgaaccacaagggaaaagcgcctcgaaaactgcggttaaactagtatcaggaggtgtttctgcggtaacagtagacgtcatttgccacactgtggggtaaggttctaaagtcattaatttaggcacttttacgctaccaggcaccgcaatcaccccaaggtcatttcgtagtaaatcaacaatcatcacattttcagcacgatttttagaatcattttttaaccaatcatgtgcttctaagtcagcttgttccgtacttccgcggcgaatggtgcctttcattggacgtgtcgtcaagatgttttccttccatttaaaaaatagctcgggtgaagcggagataatctgaaattcatccgtttcaagtagcgctgtatagtttgcttttccaacttgttgcagcgattcaaaagaagcttgggcagaaaactcacttggtacctcactttggagccgaacagtgtagttgatttggtatgtgtttccagtagcaatttctgctttaatctgtgctattttttccgcataattcgggtaatccgtatccattttaaaagaaagtggtgcagtgtctgagttttcgttaggtgcagtcgtgaagttatcgtatacaccaaaccagataagtggcatgttctcggcaggttgtttggtttttaaattgctacgaaaagcaggagcggcctcataactaacaaaaccagcaacgtattttcctgatttttgggcttcttcggccgctttcattataggaagtacttccgataaatcgcgtgccaccagttcgcgaattggcttttcaaaaatctttaccgaaccttcaaaatcaaaacgtaataaactcatttggcagctctccccagtcgtataaagttttctagaattgcgtgtccgttttcagaaaggattgcttcaggatgaaattggacactgtaaatcgcttttgttagatgctctaaccccattaaaaccccatcatctgttacagcggtcactttcaattcagctggcacagtatttgggtcaatgactaaagaatggtagcgggcaactgagaatctcgaatcaagtccggcaaataatccttcaccgtgatgcgagattatgctagtttttccgtgaacaggaacgtccgcctgaacaacttttgccccgaaaaaatgaccaatcatttgatggccaaggcaaatcccgagaatgggagcgtgaattttgtctaggagagctaaactttctggaaaatcatccggagaaccaggtccgggcgaaagaataaccatttcaggtgctaattggtcgaatgcttgaagcgaaaaatctctagcagaaactacccgcacatcttccttaagctctaaaaaatattggtataaattatatgtaaatgagtcattatgatcgattaataaaatcacttcaaatccccctagtcaaaacggttatactcttttatagcaaatagctacggagataacaagcctgaaatgtttgaagcctgaaaacaagtggaaatgtacactaaataaccaaaggaaggtgttttagatggaaaatgaactagaagataaaattctcgccattttagaacaacatcaagttggggtattaacctctgtacaaggcgattttccgcacgctagatatatgacgtttcttcatgatggcttaacactttacacaccatctggaaaagaactaccgaaaacagaggaagtccgtagaaacccgcacgtatgcgttttaattggctatgatagccctggttctgcgtttttagaaattaatggtttagcttcactggaagaagatgaatctatcaaagaacgcatctgggaaaatatctctaaagactggtttcaaggcgaagattcaccatcctttgtcgttataaaaattgttccggaacaaattagaatactgaattctgatgatgatggtccagacacgctcgatttaattggttaaagatttgcttgtaatttaagcagatatgcgatagaataactttaaattaatacgaaaagcgaagacaagaagtagtaatgaggtagaatttctaaagagagccagtggttggtgcgaactggtgaagtttccttatgaatccatcttggagtgagtggtggaaagcatagttttgcgagtaaatcattccggctgggtccgttaaacctaaatgaagctggggatttttttaagtcccaataagggtggcaacgcggttaactctcgtccctttcctgttaattcgggaaagtacgggagttttttatatggaaaaaaataaaggaggagttagcatgttagatgttaagttgttacgtaataattttgaagaagtaaagcagaagttgcaaaatcgcggggaagacttgggtgaatttgagaaatttggcgagttagacaaacgtcgtcgtactctgattgtggaaacagaagcgctaaaaagccagcgtaatgaagtatctcaagaaatcgctaaattaaaacgcgaaaaacaagatgctgatgctaaaattgaagaaatgcgtgtcgttggtgatcgtattaaaacattagacatcgaattaagagaaattgacgagaagttagatacgattttaatgtcgattccaaatattccgcatgagtctactccggtcggtgaatcggaagacgataacgtagaaatccgcaaatggggtgaagttcgcgaatttgattttgaaccaaaagctcattgggatttaggaactgacctagacattcttgatttcgaaaatgctgcaaaagtaactggcagccgcttcgttttttataaaaaattaggtgcaagactggaacgagcgctaattaactttatgatggacttgcattcgaatgaacatggctatgaagaaatgcttccaccgtacatggtaaaccgcgcgagcatgactggaactggtcaattgccaaaatttgaagaagatgcatttttaattgaagcagaagattatttccttatcccaacagcggaagtaccagtaacaaactaccaccgcgaagacattttaaaagcagaagatttaccaagaaaatatacagcatttagcgcatgtttccgttctgaagcgggatctgcgggtcgtgatacgcgtggcttaattcgccaacatcaatttaacaaagtggaattagttcaatttgttaaaccggaagattcctacgcggcgcttgaaaaattaactggatgcgcagaagaagtattgcgtcgcctagaattaccatatcgcgtactaagcatgtgtactgctgatttaggcttcactgctgctaaaaaatatgatttagaagtttggattccaagctatgattcttaccgtgagatttcttcttgcagtaactttgaaagcttccaagcaagacgcgccaacattcgtttccgccgtgaaccaggaagcaaacccgaatacgtgcacacattaaatggttccgggttagcactaggtcgaacagtcgctgctattttggaaaactaccaagaggcagatggatctgtactcattccgaaagtactacaaggttatatgggcggtatcgaaaaaatcgaattaccaaaataaaaaggaagaaggaactgtaatggcgaaccttagcgaattaccaaacattggcaaagtactggagcaggacttaataaaagctgagataaaaactccagctgagctaaaagatgttggaagcaaagcagcctttttacgtatttgggaaaaagattcaactgtttgtttaagtgaactatgtgcgcttgaaggagccgtacaaggcatcaggtggcatgatttagacgaagcaaagaaaatcgaactcaaaaagtttcatcaatccttataaaaaaacgacgatgcatattcgcatcgtcgtttttttatttcccgggaaatagttattttaattgttgttccgcaaaagaagcgtaaagcggatgagaagccactaattcgctatgtgtgccccgaccagttatttccccgtgttcaataaagagaatttggtcggcattaacaatagtggaaagacggtgagcaataacaaaagtagtgcgcccctccatcaagttggctaaagcttgttgaactatttgttcggattgactatctaagcttgctgtcgcttcgtctaacatgagaatattcgggttacgtaagaaagctcgtgcaattgcaatccgttgtctttggcctcctgagagcttcacaccacgttcgccgacttcggttgccattttgtcaggaagttcagaaataaagccgtctgcataagccagttttgctacattccaaagctcttcttcgttaatttctcggtccagtccgtaacaaagattatcgcgaatggtgcctgaaagcatagcactttcctgtgaaacgtaaccgatttgtgagcgccatgagttaatagaaatctcagaaagaggaatatcacccactaaaatttctcccgttttcggttgatagaaacgctctaaaatcgcaaacaaggtagatttaccgccaccacttggaccagcgaatgcgataacttcccctggttttgtatcaaaagaaacatcttttaaaatcggttcaccttcattgtaagagaaggaaatatcagtggcgcgaatcgtttttccgctcacatctacttttttaccagcatcgaaatcttcttctgcttcatttaaaatatctgcaatgcgttctgtcgctccctttgctttttgaagttgcgcgaagaacgttgcaaaagaggttactgggacgataatttggaatagatataacaagaatgcgattaatgtaccagtagtcatagtcccggctgaaactcgaatcccgccgtaaccaatgataccaacaataactcccattacaacaaagaaaattaaaggtccaagtacagcaacaactttcgcctcacgaataccgaatccgaatagacgattgattcctttatgaccagcttccgtttcacgtgtctcagcgttagatgcctttacgagtctcgcttcagaaagggtttgactaatagaaccagtgaagtcagctgtttcattttgaagacctttagagattttaaacattttctgaccaagcggcgcaacgactagcgctgtaatcggaacagctattaagataattagtgtcattttccagtccataaagaataggataataatcgcaccaaccacagaaataatccctgttacaaattgcggtaaatgatcggcaattagttctttgactacgactgtatcgttcaccatgcggctcaccatttcacccgtttttgtattatcaaaataggaaactggcaagtgcacgatttttcgccataaacgttcgcggatggtagctacaactttctgacccatataattaagcaagaaaatcgagaaaccgtttgttatagcttgcaaaataaatgcaagaacaatcaaagccaccatttttacatctaacgaagctatcgaaaagccatcaattaagttttttgtaaaaagtgggactacaaggccagcaacagtagttacgacactggcgattaaagcgcagaatattatccaatttgcaggttttgcactaataattaactggaaaaaattccgccaactatattttttctgatccatttatttcacccttcctaatttccccatccatataatgcttactttttaagtataatcaatttaccaaataataaaccagtctaaagtggtagttatggaattattttctcgatttgaatatttaaagaaaagtaacaaaaaattcgaatttatgtcaaaagctcacatttataagtgataaaaattaagaattataataaacaatgtaatatagttatcttaaattgagttttcagcattttttgaaagcctatgaatgagatttccaatatagtgtttatgatataattacgagtagttttttcaatattatatagcaaaggagagagtatgctattcttaaaagagcttgaatccaatctaacggttagcaaattaatggagctgtgctttgaacatccaaattacaaagactactgctcggttatcagcacgaagaagggtgaggttctagaaagtttaagtccgactgggacaaaagtatattttgttctaagtggcatatacgggatgattgtagaaaaagatgcagaattggaagaagaaaactgtaaagaatgcattgttcgtttcttgcaaaaaggagatagttttggactttaccatttgttttatgatgaatggagcccccatgtttcgatgcaaagtctaggtcatggagaggttatggaagtagatagtaatttcttattttccgtgtttgataaggaagatgagaacaactttttcatgattaaagtaatggcagaagaactacgggaagcacatacttttgcaaaactaagctttttaaagaaagaagaacgaattcgcaaagccattctcaaatgcgctcaaactctaggaacgttttctgataacgggatattgctaccaaaagaagtcacgcaagaagttcttgcaagatacaccaatacatcacgtgaatatgtggctcacacagtcatgcatttaattaaagaggatataattagaaatagacctaagcctctactagtgatggacaaaactcgtttataactttgtttcacgtgaaacttttttagaatgcttcaattgcattcttttttttgtggaaaaaagcacttcgaaagcattattttatcttttgcgttataatggctctgtaattgaaagcgcttgatagaaaaggaggatgtttcaatgagattttttatcgatacagcgaacgtagaagagattaaaaaggcgaatagaatgggttttattgctggtgtcacaacgaacccatcactagttgccaaagaaggccgcgattttaatgaggttattcaagaaatcacatccattgttgacggaccgattagcggtgaagtagtaagtttgaacgcggaagagatgattgaggaaggtcgagttattgctaaaatccatccaaatatggttgttaaaatacctatgacaggtgaaggtttggcagcagtaaaagttttgacggaagaagggattaaaactaatgtcacgttagtcttttctgctacacaagcattactggcagcgcgggcaggagcgacatacgtatccccgtttttaggtcgtttagatgatattggtgacgacggactggtgctcattcgtgatatagcagaaatttttgaaacacatggtatcccaacagagattatttcagcaagcgtgcgccatccgattcatgtcattgaatgtgccaaggcaggtgcagatattgctacagtgccttataaagtatttgaacaaatgttaaaacatcctttgaccgacagcggaattgataagtttcttgcagattgggaagctgctaaaaaataacgaggaaggtttctaactatgaatcaaacatttatcgtaaaaaaagaacacattagcaagtatccaaatccactttttgttaataaaaatgagtctatttgggtgtttgatgaagatacagaataccctggctggattttttgcaaagtgaagtcatcggataaagaaggctgggttccaaaacaaattattcagttaggcagtgacggaaagagtgggaccgtgacagaagattattcggcgcgcgaattaaatgtaaaacctggggataaattagaaagcaatcgagagcttaatggctgggtttggtgcgtaacggaagataatgaagctggctgggtaccacgagaaaatcttgaatcctaaattgtttcacgtggaacattttaagtaaatatagcaaaaaagcgaagggtttagttttactttcgctttttttgtggaataattaaggataacgatagaagaatctaggtgaacttatggaaaattggaagaagaatttgtatgttgtttgggtggggtgttttcttaccgggactggattaaatttaatcatgccatttttaccattatatattgaagaactcggcgtacataatcccgaccaagtaagtttatggtcaggtgtggcactgagctcaacatttttagtatcagcaattatgtcgccggtttggggcaaattagcggatcaaaaaggacggcgcattatgcttttacgtgctgcacttggaatggcgatagcaatgattttgatgggacttgtcagcaacgtttaccaatttgtaggtttacgtttattgatggggatattttcaggatacatttccacggctaatgcgctaatcgccacacaagttcctcgtcaccgcagtggatgggcgctcggtgctttatcaacagcagcagtatcaggcgtattaatcggtccattaattggtggagcgctatctgactcatttggcgttagaccagtgttttacattacaggcgctcttttattaggtagttttttcttaacacttttctttgttaaagagaaatttacaccagtagaaaaaaaggaaatgcggtcaggaaaggaagttttcttatcattaaaaaatcctggcttaattatctcgctgtttattacgacaatgatgatccaaattgcatccaattccgtgaaccctattttgacattatatgtgcgggatttagcgggaaatgcgcaaaacattgcctttattagtgggatgattgcttcagtaccaggggttgcggccttaatcgctgcgccacgacttggaaggtggggcgaccgaattggttcagagcgaatactgctaggcgcgctcatcgggtccatgttgctgcaaataccaatggctttcgctcaaaatccgatgcaacttggtattttgcgtttcttattaggtctcacagatggtgcgttacttccggcagtccaatcactactaactaaaaatacacctcgcgaaatttccggtcgaatttttggttataatcaatcttttcaatatatcggcaatgtcatcggtccgcttgtcggatcaagcgtggcggcgcattttggctacggagatgtcttccttgtagttgctggttttatttttatcaatgtactaatcagtttttattttaaccgaaaaatgcatagagagaagggaaatcatgccaactgatctaataaaattaccaggaataggcaagaaaatggtattaatgctaaatgaaattgggattgaaaaagttgctgacttaagaggaaagaatccgcttgatttatacgaaaacacttgcgataaacgaggcgaaagaatggatccttgtgtattatatacgtatcgctgcgcagtatatgtcgcagaaaccgatgaaaacgagcaacatgcagatttacgaaaatggtggaactggaaagataaacagcatataaatgaaaggaatttaaaagatgaataatttgaaagaagcgattaaacaagcagaacatattgtttttctaacgggagcgggcgtttcagtgccttcaggaattccggattatcgttcgaaaaatggtttgtatgcggggatgagtagccctgaatatatgcttagccatacgtgtcttgtgcgggaacccgagaagttttatcaatttgtcacagaaaatatgtactatccagatgctgtcccaaacactattcatcgcaaaatggctgaaatcgaagcggataaaaacgtcactgttattacgcaaaatattgatggccttcatgaaaaagctggctctaagaaggtagttaattttcatggtagtttgtatcactgctattgccaaaaatgcggaagaagtgtttcagcaagcgactatttacagtcagacatccatgcagattgtggtggggtcgttcggccagatgtggtgctttatgaagaagcgatttcagaaagcgcgatagaccagtcacttgcagctattcgggaagctgatttaatcgttattgttggcacttctttccgcgtgagtccgttttgtaatttaacggattatcggaataaaaaagcgcgaatttttgctgtgaataaagaacgaatttcgcttccatatccttttgaaatgatagaaaatgatgctgtgaaagtttttgcggagatttgaaaccttgcagtaatgggggtggcgtgataaaattttcttaaccgggaaattgtccggaatattttgagaaaataaggagtggagagttccatatgaaccctgaccccgagagtcagcagattatcttgcagttaattcttattgtggtgttgacaatgctcaacgcgttctttgcctcagcagagatggcccttgtatcactgaacaaaaatcgggtgaaaaaccaagcagaaaccggtgacaaaaaagccgtaatgcttgctaaactcgtagatgatccaagtaaatttttagctactattcaagttggtattacgcttgctggattcttctccagtgcgtcagccgcgactagtattgcgactaggcttgaatcggtttttggcggaagcagttttgcgaaagagttatccattatcgtcgtaactattgtgctatcttatatcacgttagttttcggtgagctttatccaaaacgtttagcactccaaaaatcagaaaaaattgcccgtgtttctgtacgaccaattatggcagttggtgttgtgcttcgtccgttcgtaaaattcctatctttttcaacagatattcttgtgaaattaacgagaatggagaaaaatacggataatgaaaaaatgacgcgagaggaaatgcagctactgattgaaaccggtcgacgtgacggcattatcgaggtagaagaattacaaatgcttcgtggtgtatttgaaatggataataaatatgcgcgtgaagtaatggtaccacggacagatgcgtttatgattgatgccgaaacagaatcggaagaactttgtgacgcattattaagtgagaatttttcaagagttcccgtctatacaggcgaccaggactcggtgctaggtattctgcatatgaaagatttttttgcggaagcgagaaagtcaggctttgaaaacattgatgtgaaatcgctcgttaaaaacgcgtattttgcccaagagacgatgtttattgatgacttacttaagaatatgcaaagaactagaaatcaaatggcaattttaatggatgaatatggtggcgtagcaggtattgtcactgtagaagatttattagaagaaattgttggcgaaattgacgatgaaaatgatgtgttttctgatgaagtcaaaaaaattgatgataatacatttatcgttgaaggccgcatgccactagatgatttcaacaaaatgtttcacgtggaacttccagcgcgtggagttgatactgtagctggctttgtgcttactttaactgggacaattccagaagaagatgataaagtagtagtagaatatgatacccttcgatttacagtagaagaaatgaatgatgctagactggtttcggttcgtgtcgaaaaagacattcaaacaagcgaactcgaacagctggcttaatgataaaaataaaagtgcggtaggagaaatctgtccgcgcttttttcttaggaatgaggtttttaaaatgccaaatattaaagacatagccaaattagcgggagtttcagtgacgacagtatcacgtgtgctcaataaccatccgtatgttgcggaggaaaaaagagcccgcgtgcaagctgttattgatgaattagactattctcctaaccgtagcgccatggacttagcgcgtggtaaaacaaatacggttggcgtgattataccttataatgatcatccgtggtttgacaaaattgtgaatggtattttagaagcagcttttaaaaatcgttattcggtgacacttttcccaacaggatatgatccgaaagaagaagaaaaatatctaatgcgcttgaaaacaaagcaagttgacgggctaattattacttcgcgtgccaataattgggatgtgattttgccatatcttgcttatggtccgattattgcatgtgaatacgtggagtccaaagatgtatcttgttcctatattgaccgagtaaaggcctaccgcgcggggtttcaatttttacaagatgaaggttataaaaaagtggcattcacagcaggacgggcctcgcgggaaagcacaagtacatatgggaaaattaacgcatatgagcaggtttttggtccagttggtgaaaatcgttttttaagtgagtgctatacattagaggatggtgtaaaagcaggaaaatacttttttgctgaagggaaagactggcctgatgcgatttatgcgaatggtgatgaggttgcagcgggtgttatgtaccatgtgaaggagcttgggttacgcgtgccagaagacgtcgctattttagggcaagaaaatctcccaattggtaaggctcttgaaatcacaacccttgatcataacctaaaaaaattaggagaaaatgctttttcgatttttgaacaaggaaaattacaacgaattaaagtggaacatgaattaattagaaggaaaacggtataaaagctagtcgccgcctcatttttaaaatatttttatgaaattgcttgacatgaaacccatttcatcatttaaaactaatatataaggtgatgaaggaggcgaatggtatgaaattagatggagtatgcaaaattagttcagccctaggaatggaatatcaattcggagagttttacatcgatagagattatcttgtttttgaccaaaacttcagcttaggtatgaaaaaacggcaaacttttccagttgcgaaattaggacagattgctttagttcgagaagaagaggaaatcctgctcacttttagctgcgataatatcgaatttgaaataaatgggaattctcatgctaatttgcgcgaatttcgggatttgcttcaaaataaaggcactaatagctcagatattcaaaaagctgaaaataagaaaaaagcgagatacacaactcaccattatcacaacttcgctaaatcttgaaggaggaaattatatgtataaagcaataatttttgacgtagatggaacgattctagacacggagagagctgttttgcattctcttcaagcggttttagccgaagaaggattaagttatgaactagatgaattacgatttgtacttggaattactggggcagctgcggttgaacagttaaatattttggattcagagaaagtattggacaaatggattgaacgtgaagcaacttttattgaagaagtagaggttttcgaaggtattcataaagttctgcatgccattccagaaagcggcgtagttacttcgaaaaatgcgttagaaatggagaaaggtttctatccatttgatattcaggatcattttcaagcgattgtttgcgcaagtgataccgaaaaccataaacctcatccggacccgctgctgaaagggttagaaattcttggaagagagccacatgaggtgctttatgtcggtgattcttcttatgatatgaaatgtgcccatgcggccggagctcattttggcttagcgctttggggtgcaaagacaactgatggctttgaaaaggctgaacttgtcttcgaaaaaccagaagatattttagcgtatgtaagtaaataagtaaaacccgccaaccttgaatgaaggctagcgggttttttcgttataaattagtgtaatgttcatcggatacgggctctaaccaagtagttccccctatatccacatttgttgaaatggctaaatggacaaaccaactatctttcgtagctccgtgccaatgtttcacgtctttcgggatagttatcacgtcaccctctttaagtaactgagcgggttttccttcttcttgatagtaaccagttccgcctgttacaagtaggatttgcccgccgtcgtgtttatgccagttgtttctggctcctggttcaaacgtaacgttcccaatcggacaattgtaaacagtatcttctgggacaagcatttttaaataagcattaccggtaaagtagtcattagtaatcagttcacctttatcaaaaataacgctgttttctagtgtactcattataaattacccctttcgacattaaaatcttttagttctttttgagccggaatgaggtgggtatcgtaattatctattttaaagtcaagtctatcaagcgcttcttgcataacatcaatgcgatttttcaactccatgcgttgttctttcagcaattcggcgcgagcttccagcgtgtgttcgccttctcggaaaagtgccaagtaatcaattaatgcttcaatagataaaccagcgcggcgcatttgacgactaaacaaaatccagcgtatgtcttctgcgccaaatttacgaatcccattttcattacgatatataggtggaattaaaccaatgcgttcgtagtagcgaattgtatcagcagaaacgccacttttttcactcgcttctttgatattcattgttaagtcttccgaagcatccaccacataaaagctaattttatttttggtcatagccattctcctttactgattttctataatgattgtattccttggagttaactttaagtcaagcgaaaaagcaaccatgatcatttattcatgattgctactatttgtttgaagtgtagacagataagctaagagcaacccatccattttgcggagtgataagtttgtttgttcatagaatttgtccaaacgatattgaattgtatttcggtgcataaaaagttctttggcagtaaggctgatgtttccttggtttttaaataacgtatgaattaaaggaatccaagtatcatcttgatggaaaaggttgttgagttcactcgtaattaaactttctttcattcttagtgcgatgacttttaaactttcggaagcgacggtttggacaacttcacgattattatggtcaaaaatggtacgttcctctgcaaataaaccgcgtaatttagcatttaacgggtgaaagagccccataaagaaagtagattgaatataaaaatcattttcaagggtaccggcaacggcaataagttcttcttccccgagcagagaaccggtggatttttcaataatcacaccataactcgccgaaaacataattagttcagcatctggactaaagaagctgagtagcgctttttgccattcttgcaacatgcttttggtggttgcggttttaatatgaaactgtgttatccggtaagtttctttttcactcgtaatcgtgacggcttcatttccaaataacaaatcgaaccaaaactgagtagattcttttgtaaatgttggtaatggttttggaaataacgtatgtagtaacgctgcttcttcttctgaaaggtcacttttggggatagtaaaataatacggttcctcgaaaaaagaaaacgtatctgtagtggattttattgggttttttgaaacgactatattgggatatctattttttaatattttaatatgcacagtggatagcaccccttctctattctttatttttacaaaagaaagataggaagtcaaattattgcccgggaaataaaaaggttgcgcagtcaaccaaattactgctatactataatggttgacgccgcaactaattatggggcggatttttttatgaggagtcggataaatggcagatagacatgaaagcttagcgaaagccatcgcaattattcatcgttcagaaagcacttttaaaaataaaaagttacttgaaactggtcttaatataggtcaattgcggtatttatggacgctttataaagaagatggtatttctcaagaatcaatggcaaaaaggtttatggtggataaagccagtgtgacgcgccatataaagcgccttgaagatcttgggatgattcgccgagaaatggatacaagagatagacgtattcaacggattttcgtgactgaaacaggatttaaaatgcgagaattaattgaagaagttacagctgaatggtctgcacttttaacggcgggatttagcgaagaagaaaaagatgacttaatgcatttgataggacgactttctgataatgcgattatggcagttgaaggaggagaggtcgaatgaaagaacagagtaaacgattaggtgaagatagcattccatcactcatggcgcgtttgtcgattccggcatttatcggtatgtttgttatgggaatgtataatattgttgatacgattttcgtgtcatatggcgttggtccgtcaggggttgcagcactttcgattgcttttcccgttcaaatgatactgatggcgatggcggcgatgtttggtattggtggtgcttcaattatttcccgctcgctcggtgccggtgaacaaaaacatgcggataaagtattccatcaagttatctggttagtacttatttccagtatttttattgcaattgtaacctttatatttttggatccacttattacgcttttcggagcaccggcggatattcatgatattgcgagtgatttcttatcgcttattttactaggcgcagtgttccaaacctttgcgatggcgatgaataatatcgtgcgttcggaaggtaatgcgaaaacagcgatgttaaccatgattatttccgctattttaaatatgattttaaacccggttttcattatgggattcggtatgggcgttcgtggttcagcgcttgcaaccgttattgcgcaggctgttggcgcgatttggctcttgatttactttttatcaggaaaaagtactttatctttaaaagggttctcattccgaatggatttcccactgattcgccggattatggcaatcgggttcccgtcatttattatgatgtcagcagggagtatcgtaacggttgcggtaaactggatgcttaatatttatggcggaacaatggcgattgcggtttacggaattgccaaccgaattgcttctttcgtaattatgccgatcaatggtgtaacacaagggatgcaaccaatcgttggcttcaactacggatcgagacaattcgaacgtgtaatgaaagctgtcaaagtatcaatgatagcagcaactgtcatgtcactaattgcttggggcttggtagaaattttcccaggaatgctcgtacgaattttctctaatgacccagaattgattgcacaaggaacaaatgctgttagatttatgcttctagctgccccaacaattggtttccaaattgtctgcggagggctatatcaagcgcttggtcgagcacggatttcctttatcatttccttaatgcgccaaatcatctgtttagtaccacttttacttattttgccgcagttcttcggtttagatggtatttggtacgcctttccacttgcagatttaggcgcgttcaccgtctgtcttgtgattatgagcaaaacatggcgccgaatttttaaaaatcccgagatagtttaaggtaaaatgaattgggtattttctaactagcgtcttaaaaataaaggagcgatttatatggcaaaaatgtacccgtatttagcttttgaaaatgcaaaagaggctttaggatattatgaagaagtgttcggagcaacgaatatttcaaggcttccagtaagtgaggaacaaagcgaaatgtttggtctagcaaaagaaaacctagagaacacaacagttcacggtggctttaccgtccttggggcaaatttattttgttcagattcattcggcaaagaagtaaaaccatccaaccaaatctcgattatgctcgattctaacagtgaagacccagcggcagtagccgacgccgatgctttctttgaaaaagtgagctcatcgggaagagtaactgtaacgttacctttcgaagagcaattttggggcgggaaaatgggacaattcgtcgacgagtacggcatctcctggatgattcatacacaaccttattctaaattataaaaaacaagtggaccagatattagttatcttggtccacttttttatttggattcacttttttcattaagtaatgttcgccgatgccaggaatgacaaacgatttaccaactttgcggtagccatgtttttcataaaaaccaacagcgacaattcgcgcattgcaccaaataatatctgcgccgtgcttccaaatttccgcttcaccttctgcaagtaatgctgtgccgaggcctttcaagcgcatccgtcgttctgttgccacaccgcgaattcggtactgagcaggattattaataatggctgatttttccggataaaaactcgcaactccaagtaaaacatccttttcaaaagcgcctaaatgaaaagtaccatccatatcatcattagggtaaattgcgttttcttcaggctgttctgggcgaagaacccggtgcctaatatcttgcgtgtcttttgctttgatttgcttgatttccacggcgcccacctccacgttatttctttctattataaccaatctttctaaaatatctattcaaaagttaattttgtttcatatgaataaccgtgaaccagctcttgattaatccaagccaccgtttcttgtaaaaggtaattttcattttctggaggcgtttctaagttttgcggcgtgacaaaagcttgccgctcacttgataataaacgccgttcaccaagtgcgccaatagaatgatctagttcaatgaaaagataagcctgcccgtctaacataaaaaaaccaggaaactgctgatagcttttcgaaagaccgaggcgactcacagttttctgaacttcttgatggaaatctgggtcgtttaaaatatccgcatgaacaggtgttagaagtggctctgtaagcaaaagtcgggccgttgttagaggttgtgttgtttcagtttcccgttttaataaaccttgataacggtcaataagccactttttacgggcaatgcgagcttcttcatcctttaatttttgttgatatttaataagcaaatcgggtaagctttccgatgtgtttttgtcgagatattgtttgagttcttgcaaggaaaaccccatatattgcaacgcttgaatgaggttgagttgttcttcttgagccgttttgtagtagcgatacccagaagtcggatcggtaaaagcggggaccaaaagcccaattttatcataatagcgcagtcgttgaatggagagttggcttttctttgccatttccccaatggaaaaaaacggttccacatttatcaccctttcgtcttgactctatagttactatacactttatcataaaggtaattcaaagcgagaggtgaaaaaaatgaaaattattgtggaaaaagattacgaaaatatgagtaaaacaacgatgcaactgcttctagggaaaatgtatcaagacaaaaaggttcatttggcaatcacagcaggctccacaccgaagcgaatgtatgaactgatggtagaagaattgaaggataaagcgccactgacaaatgtaagctattataattttgacgaaattccaattggagacgaaaaatacggcgtgactattgccaatttaaaagcgatgtactttgatccggcgggaattccagaagaacaaattcacatgctagatacgaaaaactatacagaccatgaagcgcatttgaaagcagttggcggtttggacgcgattttaatcgggattggtgaagatggtcacttctgcgggaacttacctggcgtaaccaaattcggcgatgaaacgcgacttgtttccgttcaatcacgcccagatatgttcgatattttgctcggagaagttggcggcgacgcagaaaaagtcccagaatattacgtaacaatgggaccaaaaagcgtcatgcacgcaaaagaagtcatcctattcgcaaacggcaagaaaaaagcagcaattatcaaaaaagcactacaaggcccagtaacagaagacattccaagctcgattttccagttacaccctaattttacagtggtgctggacgaggaagcggcgagtgagttgaatatttaaaagaaaacccaaccttctatttaggaaggctgggtttttgattatccgtgcacactagcaaactccgcatcacgtaactcaacgcggcgaattttaccagaatcagttttcggtaacgcttcaacaaattcaatccggcgcggatacttatacggagccgtttgttctttcgtaaatgtttgtaattcatgcacaaggtcttccgtgccctcgtatccatcttttaagacgatgaaagcttttacgactgtaccgcggatttcgtcaggacttgcgacaacagcgacttcttttacggctgggtgatgtgtgagcgcgtcctctacttcgaacggtccaatcgtgtaaccagagctaataataatatcgtcatttcgtccttggaaccagtaataattgtcttcatcgcggatagcacggtcaccagacacgaaataatcaccgcgaatcgctttttgcaaacgttctggttctttataatactctttgaaaagtgctgggaagtctctgcgcattgcgatgtccccaatttcaccgacaccgactggagttccttcagcatcaataattgccatgtattctggcataatcggtttacccatcgaaccagggcggattggcgtatcaaccagtgtcccaatcaataatgtactttccgtttgaccataaccatcacgcactttaatatcaaaattgtcttggaaaacttgaataacttcgcggtttaaaggttctcctgctgatacggcgctacgaagggcacttaaatcatgttcgcgtaaattatttactttagccattaagcgatattctgttggtgtacagcagagcacattgattttttcttcttccagtaaatgtagttgtttttctggaatgaagcgaccgttgtaaatgaagccagtcgcaccttttccaagtacagaaaggaacggagaccaaacccatttttgccaaccaggacctgctgttgcccaaacaatatcgtcctcatgaatgtctaaccaatgatcagctgcgatacgaatgtgcgcgtaaccccaaccgtgaatatgtacaacacctttaggattaccagtagttccactagtaaatgcaagcagacaagcgtcatctcgagacgtttctacgcgttcaaattcagtcgatgcagtttccattagtgtttcgtagtgatcccacccggataatttttcgccaacaataatttttttcgatacagaaggaatattttcgattttatcaaattcagcggtcattccattgtaagaaacgattgcttttacgttagcatggcggatgcggtattctaagtcatgtgctttaagaagctcagatgccgggataataatggcaccagctttccacaagcccatgtatatggcataagtttctagtagtctaggcgtcataacaatgacatggtcgccttttttcacgcccgcatcttttacaacgttagcaaatttgttcgcttgttccagcaagtgacggtaactccaagtttttgtttcatcgtgttcgtttttccaaattaaagcagttttttcagaactaaatttagcaatctcgtcggtgatattataaagttctggagcaattaatttctctgaattcataatgattctcctttgcaagtagattgtatattttgataattttgttttagtacctagtattaatatatggtaatataaatactttatgaaagcaactaaaagtattcctgtgaaaatttgagcagattgttcttacatctaatacaagctatgataaaatgacaatgagtgatttttgagaaatgaggtgcatagatggaacaagatttctttatgcaacaagcgcttgaggaggcgaagaaggcacgggaaattggagaggttccaattggtgcagttgttgttttagatggagaaattattggtcgcgcacataatttacgcgaaactacccagaatgctgtgactcatgcggagttacttgcaattgaagatgcttgtaaacaccaaaattcttggcgtcttagcggcgcagaactatatgtcacgctagaaccatgtccgatgtgcagtggagcaattttactttcgcgaattgacaaagtttattacggagcaaaagatccaaaagccggaacagcaggttcattaatgaatttattgcaggatgatcgatttaaccatacgtgtaaagtagaagctggattattagaagccgaaagtagcgcgatgttaaaaagtttcttccgggaattgcgaaaacgtaaaaaaaaagaataggtcttaatactcattatactaaatcatgcttttacgatttctattgtgaaataaaaagcaataagtcttatcaacatttacagccacttaataattgcgaaatttatcacaatctctcaaaaataaaataacatctaaagtactaaataaatttaccttaaaataggataaaatatactccagatagaactcattataaagtaaaaatctttcttaactagttcctaaacccgtggaaaataaggattacatattatttcattatgctttgtgaattacagagcaactgggcgcatcactttgggcggtttttcacaaggtttttaagaaagaagcaaaaaagcaagggactaaacagcaattttaagcataaaaaggaggagaaaagggtggataaactatttttagcccgttttcaattcgcatcaacaacgattttccattttttatttgtaccactttcaattggacttgtatttatggttgctcttatggagacgttgtatgtcgtgaaggggaaagaaatttacaaaaaaatgtcgaagttttggggacacatattcctaattaacttcgcagtcggtgtcgtaaccggtattattcaagaattccagtttgggatgaactggtcggattactctagatttgttggggacgtattcggagcaccacttgctatcgaagcgttactagcattctttatggaatctacgtttatcggactttggatttttggttgggacaaacttggcaaaaagcttcatttagcttgtatttggcttgtttcaatcggaacaatcatgtctagtttctggattttagctgcaaactcatttatgcaacatccggttggttttgaatttaagaacggccgcgcagaaatgaatgacttcttgcaacttattactaatggacaactacttgtggagttcccgcacgttatattcggggcatttgccactggggcctttttcattgctggtgtcagtgcgtataagatgctcaaaaaacaagatgtcgccttctttaaacgatcattccaaattgcaatggtcatggcggtaataggtggatttggtgtggctttcagtggtcactcgcaagcacaatacttagttaaaactcaacctatgaaaatggcagcaacggaagggatatgggaagatacagccgacccagctccgtggacgatgattgccaagatcaacccagaagagaagaaaaacgaatgggaagtcaatgtcccatacgcgctaagtttcttatcttacggaacattaactggtagcgtggaaggtatgaacacgctgcaaaaacaatatgaagaaaaatatggtgaaggtgactacatcccaccagttaaaacagcattttggagcttccgtatcatggttggcgcaggtatgttaatgattctattcgcattaatcggtatcgtgcttgcttggaagaaaaaactcgttaatgcaaaatggtatttacgtttcatgattccaatgattggcttcccgttcctagcgaactccatgggttggattatgacagaaatagggcgacaaccatgggtagttttcggttacatgaaaaccgctgatgccgtatcgccaaacgtttcatcaggacaaattttgttctcgataattgcgttctcgactatttatacgattttagccattctattggtttacttgtttatacgtgaaattaaaaaaggaccagacggacacaaaccagaaaaagcagagatttccgtagatccatttgataagggggatgaaagctttgtcactaaatgagttatggtttctattaatcgccatcttattcattggattcttcttccttgaaggttttgactttggtgttgggatgtctacacgatttatggctagaaatgcactggaacgccgcgtactcgttaatacgattggaccgttctgggatgcaaatgaagtatggctattaactgcagggggcgcgattttcgccgctttccctaactggtatgcaacaatgtttagtggttattatattccgctagtattcttattacttgctttaattggtcgtggggtttcttttgaattccgcggtcaaaaagattcaccgctttggataaaaacgtgggattgggttattttcttcggtagtattttaccgccattcctatttggtgtattatttgctagtttgattcaaggtatgccgattaatagtgatatggatatgtatgctggtttctttgattacattactgtattctccgtatggggtggcgtgacgattacgcttatgtgcctacttcacgggttactatttattactttacgtacagaagaagatattcaagatcgtgctcgtcgtatggcgaaacgtgtttggtttattactgtaccagctttagtaattttcgttgtacttgcttacttcaatacagatatgttccaagttagacctgtacttgtaccactgatgattggaattgtagtcgttatgtacgtgctatctgccctgtttatttggaaagatcgtgatattttggcatttacattcggcggacttggaattgtcttcacgattgcgacgattttcgtgtcactattcccacgtgtaatgatcagctctatcaacagtgcgtttgatttaactatagaaaatgcagcttccggacaatattcgcttagtgtgatgacgatagttgccgttacgctattgccgtttgttcttggttaccaaatttggagctactatgttttccgtaagcgcgtttctagtaaggagaaaatgacgtattaatgggaaaagatttaaggaactacaaaggaattaaaaaaataatggcgattctcgcagttttcacgcttgttcaaggtgctgcgattatcgtgatggcgataactttagctcgtgcgattactgacttatttcacgagcatccatttcaatcagtcacaatacaaataggtctcttcgcgggggcctatttcttgcgtcactttttgaacgtatggaaaaaacaaatcgtttatcgctatgctgcaaaacttgcgaagacaatgcgagaagaattactagatagtttgttcgcgcttggaccgcgttttgcacgagcggaaggaactgggaaagttgtaacgatggtaatggaaggtgtagctgacttccggaattatttagaactgtttctacctaaaatgatgaatatggctattattccggcgatgatttgggtttatattgcttttcaagactggacttccgcttttattttgatgattactttgccgattttaattgtatttatgattattctaggattagctgcgaaaaaacaagctgattcgcaatttgaaacatatcgtgtgctgtccaatcactttgtagattcgttaaaaggtttagagactttgaaatatctaggattaagtcatgaccatgaaggaaaaattgcttcggttagttcgcgctaccggaaagctacgatgaaaacgttacgtgtggcatttatgtcttcatttgcgctggatttctttacaatgctttcgattgcgcttgttgccttattcttaggtcttggccttattgacggtaatatgaacttgccgattgcgctaagtgttttaatccttgcgccagaatactttttaccagtgcgtgaagttggctcggattaccatgccacacttgacgggcaggaagcgggtcgagttattcaagggattattgaccaagctaaagcggacaagccagaaacggacgctttaccgctaactccatttgctgaaaataccgagttctcctttgaaaaaattactgtgaagcacggcgcggatgatgctgtatcgctacatgaagcaagttttactgtgaaaggttttgaaaaaattgggattatcggtgcgactggtgctgggaaatcgacgttaattgatgttttaagtggctttttgacaccaacttccggagattttcgctggaatggaaaaactggtgcggcgcttgcttcaactgattggcaaacccaagtaacttatattccgcaacatccgtaccttttccatgatacaatcgctggaaatattcgcttttatcatcctaattctaccgaagaggaaatgaaaaaagcagccgaatcagctggtttaaacaaacttgtagccgggcttgaagatggctatgaaacgcttgttggggaatcagggcggatgcttagtggtgggcaagaacaacgtgttgcgcttgctcgggctttcttaacggatcgtccagttgtactaatggatgagccaacagcacacttagatattgaaacagaatacgaactaaaaaaaccaatgctagacttatttgaaaatcgacttgtctttttcgcgacgcatcgcttgcactggatgcttgaaatggacagaattatcgttttagatcacggggctgtggtcgaaacaggaacgcatgaggaactactggcgcgtaaagggttctattacaatttagtcaaagcccaattggaggaagtatgatgcggaaaagtagctggattatcccatatattaaagaaaatcgcggcttgtttttacttgtcattttccttggaacgctaacttttgcgtcagctggagcgcttatgtttacatcgggtcatttgatttcaaaatcgtccctgatgccagagtcaattatggctgtctatatttcaaccgttggagtgcgcgcatttggtattatgcgctcggtttcacgctatgtagaacgcctttcgagccattcgcttgtccttcgaattttagaaaaaatgcgtgttcgactgtatcgtttacttgaaccacaagctttactactaaaatcacgctataaaactggcgatattctaggtttgcttgctggtgatattgaacatttgcaaaacttctatttgactacgatgctaccggcaattgttagtcttgtactttacgcaattgtcgttattttacttggagcattttcaattccatttgcggcgcttttcgtacttttaattggactactcgtgctggtgctgccatgggtctcccttttatatgctcgcggcaagaatgcttatttaaaacaaggtcgaaacagtttgtatcaaaaatttactgacgctgtttttggtattagcgattggaaatttagcggtcgtgaaaaaacatttattacgaattatgaaaaagacgaggcggatatgcttcgaactgaaaataaacagtttcattttgttaattggcgtgatttctttagccagttagttgttggttttatggttatcgtgatggtctattggagcacagctgagtctcgtgatggcgcgttttctggaacaatgattgctgctttcgttttagctataatggctcttgcagaagcgtttgtaccagtttcaagcgctattagtgataaatcgctctaccaagattcgctagcccgcctagacaaaatagaagaccctgcgcttccaacctttgaagaagaaacgaaagaaattgcccgcattaataccgaaaatgtagttttaaaagcagaaaatttatctttcgcttacgataataagtcgcctaaaatcttaaacggttttgactttacccttgaacaaggtgaaaaagtggcgattatcggtcgaagtggaacagggaagtcgacttttcttaaattagttcaaggagctttactgccaacagctggaaaagtaacgatgaacggcattgaggtggagaatttaagaccgcaaatccctgaaattacatcaatgttaaatcaaaaagcacatcttttcagtacaacggttttaaataatattcgcttaggaaatcaagatgccaccgatgaggaagtttatgcggcggcaaaaaaagttcagttacatgattttattatgagtatgccagatggctaccatacacaaatgagtgagatgggcgagcgtttttctggcggggaacgtggtcggattgcactagctcggattttacttcaaaatacgccgattgttattttagatgaaccgacagtaggacttgatcccattacagaacgagatttgctagcaactattttcgaaacattagccgataaatcactcatttgggtaacgcatcatttagtcggagcagagaaaatggaccgagtattatttttagaagaaggaaaaacattgatggaaggccgccacgccaaattaatggcagaggaaccaagatataaacggctttatcaattagatagacctattgaattatagaaaaaagcttgctaagaaaaaacttagcaagcttttttgtagtacttccttaacatttgtaacaatattgtaatttaaaattgacttttgactcatttctgcttatgattaatatatgaaaaaacgaaaggggaatttattatgaaaaaattccacgggcttgtacttatagctttgttaactagtcttatcattccattttcattggcagcaagcgctgaaacaaatgaaaatggtaacaatgtaactccaacagaagataaaataacagatactactaaaaatacaatcactgaagatccttcaaaaacacctgaaccgccaaaagaagcaccaaagactaaaactactgaaccacaaaaggctactgaaccacagaagaatactacaccaacaactatcgacattaccgattcagctgaagtttattcctatgaacaaaacgataaaattgcgctaaaagattttacagacacattaacaacacatacaggtactaaattagtaaattatcgcttagcagagaattctaaactgaatacagcagaaccaggtatccatgttatcaccttacttggggaaaatgaagaaggcaaaactacagcagtcaaattaaattatttagtaaaagaaaaaacagcccaattaactgtcacagatatgaattttgatttagaaacaaagatttttactggaaaaacgaaaccattcgcaagtgtctacattacttctcccgtagatgaaaattttggcgagggagtaacaaaagcagataaagatggcaatttttacgcgcagtgggctacagtgccgaaaaaaatcttcgcttatgctttcgatgaagcgggtaatttcagcgaagaagtaacctatgaagttccaacgaaaaaagaaaatgacgtggttgttaaagctccggcaaacgtgaaaaaaatcgaaacaactaacgcagtaaaaagtgcgacagctaaaccaagcacacctaaagcatccaaagaagacttacctgcaacaggggatcaaggcgtggaatggattttcgttgtagcaggtgttatagttatccttatagcaatattactattacgcaaacgaaaaaaataagctaattgtcatagggaataactcgaaaaaaggagcgaataatgaagaagttattaagcggtttaattattgttctaatggttagcctccttggtcactcctttaacgccgaagcagcaacgtatgaaaaaatcatttacgacaaagcagttaatttaaaaggggtagtcaatcagtcgaagcgaaacgatggtattactaacaaaatatacaagacaagtagtagtgtaaaatatctcggttcggcaaaaaagtatgataaaaagacactcattattactcgcgaaggaaaaacagctagagcaaaatggtattattgcaagctcggaaatacgaatattggttggattgacgcccgagctttcacgaatatcggcaaaccaactatcgctgacaccgttccagcactttggaatagtaaaaaagcaattattacaacaaaaccaaaaagcactacagcaacgacttactttttccagaaaaatagtgccggcaattggtatgaagttcgccattttacgagtcatattggaaaatggggttttgatccaaagttctctgaaaaaagctcagggacaccagttggcgtttaccgcacaggcattgcttttggtcaaaaaggaaatccaggtacgaaattaacttttaaagcaattactaatcgtagttattggatttctaattctaaagataaagcttataatacctggcaggaacgttcttcttctagttctgccgacgaaaaaatgaaaatcccacaatacatttacgggatggaagttaaatacaatgctaaacgtataaagggaaagggttctgctgtgttttatcacgtagactccccgaaatataattatactttaggttgtgtagcacaaagcgcagcaaacacaaaagaagtacttaaattcgccgataaaaacacattaatagtgctaggcgaagaaagccgaattaaaacatttaatacgataaactaagctagagaaattctctagctttttcttttgcaaaaatccaagtagcctagccccaaaatttatactatttgacgtataatgaaaagatacaaagatatgaggtgaaatgttttgacgagcaaatcttacataatgggcgtagatattgggacttcaagtacaaaagcagtacttttcaatgaacgtggtgaggtcatttgccgggaagctacgcattatgaattagtaacggatgaaacggggaaagcggaagagagtcctactgaaatttttgaagcagtcataacatctatccaaggcgtaatgaaggatatagataaaacagaactaagaggcatatcatttagttcggcgatgcatagtttaattatggtaggagcagacggagagcttttaactgaatgtatcacttgggcggacggacgaagcagtgaggcgcttgaaaatataaaaagggataattacttgtttcaactatatgaagcgacagggacgccaatacatccaatgagcccctttgctaaaatttgttggctaaaagaagatgaaccacaattattccatcgcgcggagaaatttgtcgatattaaatcttacattctgaatcgtttgtttggcgtctgggtgatggatgaatcgttagcatcaggaaccggactttataacattttagagcatgactgggaatttgaagcaatggaaatcatcaaattaaccccagattatttgccaaaagtagttccagaaacctaccaattacatggcgtgaaaaaagaatacgcggaattaatgggtattccggaaaacttgccatttattgtaggtggaagtgatggagcgcttgctaatattggtattcaagcaacagggcgaaatgatgtgacgattactgtaggtacgagcggggcagttcggaaattaacaaatgaatttcaggtggactcgcgtggtcggacattttgttatggtgccggggatggctattttatcgctggtggagccgtcaataatggcggaaaagtagtggaatggggattacagcaattcggatctgaaggtgagattatgaatcgcgattttgcaagtttcattgctcatatagatgaagtagctcctggcgcatctggattgctctttcaaccttatttacttggcgagagggctccgttttggactaacgatattcgcgggggctttgttgggctcacgattaatcattccaaagcacattttattcgcgcgattttagaaggaattgcgtttaatctcgcggaagtctatgaagcagtttcggctccggatgatattatttatgtgacgggtggtatttctgggcatgatgcttggtgtagattgctggctgatattttagaccgggaagttcgcgtgccacatacaattgaaggttctagtttaggcgctgcaattatcggaatgcgctcgctgggaattttaaaaacgttgaatctggaacaaacgcttccaattaaagcagtctatcatcctagtgaaaacacgaagaaatatgcagaattacgcccaattttcaaacaagtaacaacacaattaatggctagctacagcatgctaaatagctggcaaaagaagtttgattataacagctaatttttgtgtttcatgatataatcactaaaagaaaagcgataatgtgaagtaagggggagaagactatgaataagaaaatagtatggatagctttaacattagtaggtatttgcgtagttggaacaattattgcagcaatcatgagtgtttacttacgttaaaaaatatttccccgttttctacttgcactttttacactaaaaaggtacactagtaattgagctcttttcagagtttgcgctaaataattttttatttggcacttaattattggtagcaaatttgtcgtgctagacggggaggtagcggcgccctgtaacccgcaatccgctctagcggggttgaattcctcatttgaggcatcgtaattgtttggtctgcccttgacaagtggtgttgaaggttgggtcttgcgcaatgggaacctgtgaaccatgtcaggtccggaaggaagcagcattaatcagtgcttctcatgtgccgcgaggttgcctggcccgagctaactatcaaggtaacgcaggtgattgcatgtcgaggtgaggtgcgcgacactaattttaaatatattaaggactattttgcttatcgcgaaatagtcttttttctacaaagcagctactaaacttataaaagtaatgtataatcctccataaactggtacaatataatttagtaaagcaattcatgacaaaggatgaaaataatgcaacaactaaaatctaaaaagaaatggctgcccgctttaatcattgcagttttaataggaatccttgtaatcttagcaattatgtttggcttttttcagcgccaagaagtattcgataaatacgacgttgcttacgaaatagacggcaagttatatgaggtttttccaattagtgcaaccgatatcggggtagataaaaaatctaaagacaagcacctctacttccgtgtaaatagttattacaatatcgattatttattccgtctagcgtataaacaatatgaaataaatgaaccttcgacaaataaatattactcaggtttgattgactacagcgtggccgataatgcttacgttacacaaaaagatgtgtatatcacaaacaatgaatcttatgcaacatatgacttttttgataaaaatggcaagaaaatctattcttataatcctgaagaaacctcaaacgatgattatatcgtccggattaaacctaccattttacaaggttacgaaaaaagcgacattggtagttatgatgattacttagatattacaagcttgtttaaagacaaacttggtatgaatgtaaaagttcgaattgatgaggataaagaaatggtcatcttttctattaactaaaaaaagagccccggtagcgggggctcttttttgtttgaagtggattaatcgtcgtctgtttcacgttcggctggctttttcttttgttcttccacagtttttggttcttttatatcatctggaaatacaatcgaaaaatgctcttttttcacaactttgctatttttcgactcttccggcatatcacgttttactgccatatttatcacctcgaattgttggtattacttagcttatgctcattataacacagaaagaagaatctatgaattaagtgaaactgtgtaatgttagcgcttacttacacagttttttaggtatgtgtgtaatagtgcttcatcggtataaatgataacgattacaagcgataatcgtatattttcttactcttagatacttggcacggaaattgcaatagattaaagtgaatctaaatgtaagccttatcatgaagcggagaggaggactcccaaaatttcacgaggtcctgcaaagattccatctggtttgttttagcagtagagattgctaaaacaacgtaaacagatatagttgataaacctaaaggggaagatacatagaaattatattttgtttaaagagatgagcagtaaataaaaaaggttaatgggaggataaaatatgaatggtttgacagcatttttagagaaatattttgtaccagtagctgctaaaattggttcgcaaaaacatttagtggcgctacgtgatgcttttatttctacaatgccaattacaatggctgggtcaattgcagtacttttaaatgcgttttttagggattttccaactgactggggatggacaggatttgtggaagcaatgcaaccacttatcgggattaatggatatgtatacaatgggacgttagcaattgtttcaattatttttgcattttcactaggttacaatttatcaaaagcgtatgaagtagatcgattagctggggggctagtgtctcttgctgcttttgttatgaacttaactgttactgtaagcttagacgcagtaaaagctgctattgcggcttctaatgctaattttgatgtcaatactttaccaaaagaatttgctgggatttacgggttctttaatcttagtcaagtaaatggtaccggattgtttactgcaatgattttcggttttatatcaactattatttatgcgaaattaatgcgcagaaatattattatcaaaatgccagattctgttccaccggctgtaagtaaagctttcgcggcaatcattcctgcgttagttgcactttatgttgttggtattattgactgggcattcttcaaaatcactaatatggacgttattacttggatttccaaaacaattcaagaaccgttattatcactttcgcaagggtacggagctgttttactagttactttcttagtacaactactatggttcttcgggattcatggtccaaacgtacttgctccggttctagagtcactttggggtacagcacaactacaaaacattagtgcagcacaagaaggcgctaaattaccattcgaatgggtacgtggttctttcgatgcgtacgtatggatgggtggatcaggcggtacacttgtactaattatcgctttactaatgttctcgaaacgagcggatgcacgaacagttgcgaaattgtctcttgcaccaggtatatttaatattaacgaaccaatcatgtttggtttaccaatcgtattaaatacaatttacttaatacctttcattatcgcaccaatggtaatggtaacaatcgcttactttgcaacaacacttggcattgtcggcccagttaaaattgcagtagtttgggtaatgccgccacttctgaattccttcttagcaaccgggggagattggatggcaccagtaatttcactcataaatatggtcgtcgcgttcttgatttgggtaccatttgttattaccgcaaatcgcgttggtgtaccggaagaagagatgaaagcttagaaaataataagtttctggctaggtgcagctaattgtgcctagccagtatatcatgtaggaaatcctgcgccatttttattcattgcaagaagcgaaagataacgttaaactatagaaaaggaggtttttttaaatgattattcttaattgtccaatgaaacgtgattatattactgaattacttgaaacatacgataaagacggtgtaacttttaaaaaaattgctgaacaaggtatgaaacttacttttgaaacaaatattgaagacgaagaaaaagcagcaaaaatcgccaaagaaacaataaaagcaactgaaataggctctgtactctatttccaagttagtgtgggttgaaaatgaaaattgttaatgcactatttattattagtataggtcttattattattatgtttagtccttcttatggaaaagatgggatggctagtgtacctcttctagttacaggacttgcggttgttttaattggctgtgtattcatcgtgctaaaaatccgtaaagataagaaagaaaagaattagaaggagtcgattgaaaagtgaatgtcacacagaaattatatatttctcaaaaagaatgctttgatacactagttagctcagccatttatgatgtgaaaaatgccactggtaaaacgcttcagatgcgcaaactagaaggatataaataccaacgaacaatgtctaacggcgcacttgctactacaaaaattttgaaagtaactcctaatgagttatatcaattcgaaacaagcagtcgagtaaacacacatacgactacttatacgataaagtcaacaagtgagacaacttgcgaagtgacttataacgaattaattgaaacggaaaaagcaatgaataaaatgaataatattattgttggttttatgtttggcttcttccggaaaaaacgtgtgaaaaatttgctaaaatcaattgagctttcggttataaatgaaagtaagaagaagcaggagaaattggctgctaaaagtgaacagtaaggtttggaatcgggctttttcgggggtctggttctttttttgaggggttttgttttttagtttttggtggtggtggtttttgaagctagcccgactcaggacgttttgaaagttctgggaaggattaaatcatcgctgcgctcagatttatattgaagaagtaaatcaaaacaaagtacgttttgaaacttcttcaacaatacgttataataaaactactaaaatggttttaggtgaaggagagtggcagatggcgtatcaggctttgtatcgggtttttcggccgcagtcgtttcaggatgttgttggacaggaacatgtgacgaaaacgcttaaaaatgccattgtgcaaaataaaacttcgcatgcttatttattttctggacctcgggggacggggaagactagtgcggcgaagatttttgcgaaggcgatcaactgtgaacacggccatgacggggagccttgcaatgaatgtgagatttgtaaaggtacgacggacggttctataccagatgttcttgaaatcgatgctgccagtaataacggggttgaagaaattcgagatatccgggaaaaagtaaaatatgcgccaactgtggcgaaatataaagtatatattatcgatgaagtgcatatgttgtcgacgggagcgtttaatgcgctactaaaaacgctggaagaaccgccgaaacatgtcatttttattttggcaacaacagaaccgcataagttaccgctaacgattatttcgcgggtacaacggtttgattttaaacgaatcacgacacaagatattattggtcgtttgaaatttattttggaagaagaaaaaatcccttatgacgaaaaagcgttgatgattgttgcgcgtgcggctgaaggcgggatgcgtgatgcgcttagcttgctcgatcaagttatttcttacggatcagaagaagttaccgtggaagacgcgctcgaaataacgggttcggttgctcaaaatctccttacaaaactagtaagtgcagcgtttgacggtgatgcggcggaagctatttcgactttaacagccttacttgcagaaggaaaagacccagttcgtctagtggaagatttacttgttttcttcagagatgtattgctatatcaaaaagcgccaaaccttgaagaaacgttagaacgggctttgatagatgaagattttgttgctttggcaaaacgagctgattcactaaaagtttatgagtttgttaaaattttaaatacagctcagcaacaaatgcggttctcgaatcatccgggaatttatgtagaagtggcgcttgttcagttaacgcaggctgggcaatcagcggtaagtggcgggaatgtaccagcggatgcagcttctggaagtgactttggggacttaaaacgccaaatggagcaaatgcagcaagaacttcaaacattaaaaaaacaaattgctagtggagcagttgccacccaagctgaaaaaccagcacaaaatcgtggtggatctaaaaaagccataaacaacggcaaacaatttaaagcacctattggtaaaattaaccatgtattaggtgaggctaagaaagagaatttacagttaatccgtggttgttggggcgagcttttatccatgttgatggcatcccaggcagcacttttaaatgatgcagaacctgtagctgcatctcaggatacttttgtgttaaaatttaagcatgagattcactgtcaaatggcgatggataatccgaactttgttgaaacgattacgtcgagtattgcacgacttacacaagtaaattatacttttattggaatcccagaagatcaatgggctgaagtaagagaaaatttccttcatagtcatggtagcgacggtgatgcggaggaaggtacaaatccagaagctagaaaaccggcggaagatccttttgttgcagaagccgcaaaactcgttggtgaagatttgcttgaaattaaagattaaaaaacaatagaagaaagaggagattattcatgcgtggaatgggaaatatgcaaggtatgatgaaacaaatgcaaaaaatgcaaaaggaaatggcgaaagctcaagctgatttagaagctcaagagttcactggaacagctggtggcggaatggttacagtaaaagctattggtaaacgcgtcattactgatgttgttataaacgaagaagtagttgatccagaagacatcgaaatgctacaagatttagtacttgcagcaacaaatgatgtattaaaacaaattgaagatacaacttcacaaacaatgggcaaattcacacaaggattaaatctccctggaatgtaatattgtttggtttgagactcttggcttaattacaagagtctcaactatttttcaatagaatgttccacgtgaaacattgtgtattttgaaggtgagaggaagacgagatatgcattatcctgagccgataacgaaattaatggacagttttatgaaattaccgggaatcggacccaaatcggcagcaagactggctttttacgtgctagatatgaaagaagacgatgtattagactttgcaaaagcacttgtggatgcaaagaggaatttaagcttttgctctgtttgtggtcacattacagataaagatccgtgctatatttgctcggacacatcccgcgatcgcagtgttctttgcgtggtgcaagaatctaaagatgttatcgcaatggaaaaaatgcgcgattttcacgggctatatcacgtgcttcacggcacaatttcgccaatggacggaattggcccagaagatattaatattcctgatttgcttaaacgtttgcaagatgacaccattgaagaagttattttagcgaccaaccccaatgttgaaggggaagccactgcgatgtatatttcgcggttgttaagaccttcaggcataaaagtaacaagaatagctcatggtctgccagtaggtggagatttagaatatgcggatgaagtcacgctttctaaagccatggaaggacgaagagaagtataaacagaggtgataaaatggagtccagaagtaataagttcggtcggaagaaaaacaagaaaatcggaaaactacacaaatcctatgatgcttatctgatggaattgattgaagtcacgcaagaaaagtggcataagcagaaagttttaatgcgaaaaagttttgagtacgatcctaatttagaatatgaggagaaaaaggcggaagctcgctatttttacctctttaaagaagctcgtgcacgtcaattaaagaaataaagaaaaaatctactagtccatattggaatagtagattttttttattatatttcagaacggacatacattacatctggagcatggctaactcgctcaccattatttaaacgctcgacttggcgcatatctgcttctgttaattcaaaatcataaatatctgcgttttctcttattcttgaaggcgtttctgattttggaatgattgaaatattattttgcaaatgccaacgaagaacaatttgggcaggagatttaccatgttttttcgctaaatcaatcagaatttgctcttgtaaaacgccacctcggccaagcgggctccaagcttgatgaacgatatgcaactcctctaaataacgatgtaacagctgatttggaaagtgtggatgtgtttctagttggtcaactactggaagaacattggcacttgtacgaagccggtctaaatggtgcgcttcaaaattactcacgccaatcgcgcgaacaagcccttcgtcatataatttttccacagcacgccaagtttcgaaaaaagtatcttgtttcggccagtggactaaatataaatcaacttggtctaattgtagttttttctgagatttttcaaaagcacggagcgtttcatcgtaaccttgctccgtattccacatttttgtcgttacaaaaaactcgtcccgctttaagccacttgatgcaaaaaagtcaccgagttctttttcgttatggtaaaatgaagccgtatcaaacaagcgataaccaacatctaccgcagtttctagtgcagtacgcatacgctgttcgtccgttagtttgtagaccccaaaaccatgtctaggcatttcgattccgttgttcagtctgtatgtatccgagaaagaaagtgtcatttaattaacctcctactttagtttactaacttaagcataccagaaaatggataatttctgtagagtgaaggggtggatttggaggattttttatagataataaaaaaaggctgaaactcagcctttttaattcgtaattaaactatttaatacgtgcgcaattccgtcttcattgttggataaggtgatggagttggcagctgcttttaattcggggacggcgttactcatagcaattcctgttccggcgtattcgaccatggtgatgtcgttgtggccatctccaaaagcaatgatattttcagcgtgtattcccattggtgttaaaaccgtatcgagtgctttggctttatcgatgccttgagctgtgaattcaaagtagaaatcagctgtgaagacacaattaagtgtatttttgaaaggcgccatcattgcttgataattttcttgcatataggccggatcgcctgccgttagtattttactgagacggtaatctaaaaatgcagctaaatcatctttttcacagagtttaaaatttcctccgcgagactcatactgaattatgtttattacttcgccgcggtaaggtacgtagcagtcgtacacatcatttgtatacatataatcctctttatcaatcattactttcacttcaaactgtttcatatgttccaaaacggcttttccttctgcaaccgtaagcgcttggttgaataattcttcatttgtcgcgcaatccactactttagctccgttgtatgaaacgagcaagccgtggtgtttatccatttctaattgctcagcatatgcgtgcatcccagttgttggtctgccggatgcgaggataagtttcacgccattttgttgcgcggtgatgagggctttttttgtttcgggtgaaatttttttgccgtcgtttaataaagtgccatcaatatctaaaataattgcttgagttgtcatgtagtttagctccttttttctttattgtatcattagaaaacaagaaaaaggcaggagcatcgcatattgagatttttttttcatttggataggaaataggtgctttttttgaaaaatcattccaattcgctgttcattttttgataattggttgttttatattggatgtttttttcataatcgtgattaaaataaacagaataaagcgtgtcgaaaatacttagtaatgactgccgtgttgagaaggaagagactttgttgtaatgattttcggcggaggccatatagattttgtgagtggcaaattcgactaaagggtttgcttgcatggaagtaattaagattatatcgacatcgttttcggagaggattttgactactctttgaagggttcggcttcgtccgccgtaggaaacaacgatagcaatatgatctttgtcactatttgcggcggacaaactttgaatataatcttcctcagggacattgactaaaacaccgatttcctgcatttgaaatttgaagttttgcgcgaaaaataaattagcggaagcggcgtaaacatcaattgtttttgccttaattaatttttcgccaatttttacaagttcttccggatcggcgttgtttaatgtttcgtcaatcgttcctttgtagatttggttcagattggtcattatttgataaggcgtatctgattctaaaataggataatcatagtttatttctttttcttcgtttgtttcgcgaaggctcgaggcgatttcgatttttagttcgccaatgccgttcagccctagcttattaattaagcgatagattgttgcagcagagacgaaagcagcttgagctagctcttttggcttgaattgaagcgtttttttgggatttaccacaatgtagttggcaagttctttttcactattagttaaattagttagttcgcgtattttaattaaaatattcatcgtttcaaatcctaactttttagaatgggaatttattttaagtaattataccattaaataaaaaagtccctctagacaaaaaagcatctaaagggattttttcagttatttaatttcgattgttttaagatttgctgcgattacttccggtttttcgtccatttgaatttgagcagcagtagcataagctccctctaaaatgggggcattaaaaagaataatttctttttcactaatttcttctactgtttcaatgttcattttggcgcttccaaggtcataaaaagtgtagactttgtcggcttcattgctttcaatcgcttcgtttactgtgtcgaaacttgtgccaatgcgaccatcttctgttccaccagcatgcgtaatagatacgtcaggtgcgatttctttaatgatatcatggacaccttttgcaacatctttggagtgagaaataatgacaactccatatggtttagccataattcagctcacctccgtttgaagcattgcgtggaataggagagcagaagagtaggcgccgggatcgagatgcccgatagaccgttcacctagatagctggcacgtccttttgttgcttttaaatcttttgttttttgtaaagctgcttcaacaacatcatctgttaaatcttcctgatgaagggcatttacaactggttcccaaacatcaatcattgttttctcgccagcatgggatttaccgcgtttttcgatcccttcaagtcctgcttcaatcactttggttaagccttctgcgtcaattgtttctgaatcgaccgctttactcatgtttaaaaaggctgttccataaagtggtccagatgcgccgccgaccttgctaaccattgtcatcccagcggttttaaatacatctgttaaatctgctggctctttctcggtaaaagcttttttgagttcgcttagtccgcgagccatattgattccgtggtctccgtcgccaatcgcttggtcgagatcacttaataattgtttattttcttgtacgcgttcgccgaaatcatttaaccagcgtaacgcccaatctttatcataagtcattattcattcctccaaatctttttaccaagcaattgtgtctactggaagtttcaacatatcgacccatttttcatcttctaatttcaaaatggtaagggataatccggccatttcaagtgaagtcatataatcgccaacgagtgttttttcaacttgaacaccggcattttttagaagttcatggacatcatttgcgaaaacatattgttccattagtggtgttgcgcccatgccgttaacaaggacaaccactttatcaccagctaggagtttgctttcactactaatgcgttcataaagttgtttagcaagtcttgcggatggcataattttttcacgcgtaaagccaggttcaccgtggataccaatgccaagctcaatttcgtcgtcgccaagctcaaaaccaggatgtccaacctcgggaactgtacacggagaaagagcaaccccaagcgttttaacagaagcaataactttttcgccgagtgcttttagttcttcaagggatgcgcctgcttctgcggctgccccgataattttatgcactagaaccgtcccagcaacaccacgacgtccagttgtaaaagtactgtcttcaacagcaatatcatcatctactacaatttgttctactttaatatcatcggcatccgctaaatctgccgccatttcaaaattcattacatcaccggtataattttttacgattaaaagcacaccagcgccttgatctgcggctttaataccttcataaatttggtctggggttggggaagtgaaaacatcgccacatacagccgcagagagcattccgcgacccacataaccagcatgagccggctcgtgaccagaacctccgccgcttactagcccgacttttcctggacgtttatcatttcttgcaatgacgcgagttccttcgacacggtgaacaacatctgcgtgcgatttaactaaaccttccaccatctgttctactacttgatctgtaccgttaagaatcttcttcatctgacaaaaaacctcctttaaaattgtcctcttacctcaatttccctttactagaaagtcaaaacgtggttgctgtctttattatacaacttataaaatgaaaacgctttaaaactgcaagaatgtgtcataaatccagcaaaatggtacaatgaagaagagaatttgaaaaggggaattgttatgcgagatcaatctaaaatgcctttagtggaacggttagatgctcatgctaaatcctgcccaatatcactccatgttccaggacacaaaagtggagccatttatccagctgtatggcaaaatttattaaaatgggatgtaacagaaatcaccgggatggacgacttacatcacccagaagacgtgattttggaagcagaggagttactttctgaatgctatggaagtaaaaaaagctattttctagtcaatgggacaagcggaggaagcttggcggttattatggcgacgttaaagcgcggggagaaagttttagtgccaagagatgcacataaatcaatcttgcatggcatcgaactcgccggtggaaaaccgattttcttaactccggcaaccaataaagaagtcggcgtcgcgagtggcgtgacaaccgaacttctggaagaaaccttacataatcacccagatataaaactatgtattttcacttatccgagctattatggaacgacttttaatttagaaaaatgtattcgaattgcgcatcaatatggcgcggttgtgtttgtcgatgaggcgcacggggcacattttttaacgagctctgagtttccaaaaagtgcagtggagcttggtgcggatgtagttgttcagtcggcgcataagacgctaccggcgctaacgatgggatcctatttacatgtcgtgaatgatttaccggtttttgaaaaactagcttattatctgcaagtatttcaaacgagtagcccatcttatttaatcatggcgtcactggatgcggcgcggaaatatgcggcaacttacacagcagcagacgtcgaagctttttggaaaatgcgtgctagatggattaaatggctaacgaagaataaatttgaagtcattttgccagatgatccacttaaaatcatcgtccgcaaaacaggctacacgggctacgaattgcaaacgatttttgaagaaagttcttattttccagagcttgccgacgagtcacaggtattactgattttaccattaatcaaaaaagggattgatttcacgccaattagtcggattcattctccatcgaaaaaagaaatcgcgaaacaaccatatgaaatgtcagcgccttttgcgtcaggtcttgcgttaacttacgaagaaatgcacgcccgcgcgaccgaatttgtgtcattagatgaagctacgacacgcgtttcggctgaaacaatctcgctttatccgccgggaatcccagctattatccgcggagaaagtatcacagaaaaacatatccgcgaactaaaaagtattcgctcgcggcactaccaaggcggcgaaaaactagccgagaattacatccgtatattccgctaatttatgctataatcaaacagaaagcgacgcgaaagggaaaggaaattacgaaatgaaagcaatttttattacacttgaaggtccagatggttctggaaaaacaactgtcggcaccctgttaaaccaaaaaatggaagaagcgggtattgatttcattaaaacccgtgaaccaggtggcagcccgatttcagaaaaagtaagaaatatcgtcctcggaattggcaatgaagaaatggatccaaaaacagaagtactgcttattgcaggcgcacgccgtcagcatgttgttgaaacaattcgcccagctttagcagcagggaaaacagtactttgtgaccgctttatggatagctctcttgcttaccaaggagcaggacgtgacatgaatatggaacaagttttacaagtgaatttatatgcgattgaagatacaatccctgatcggacctactaccttgatgtacccgcagaagtcggcttagctagaattgctgctaacaaaggccgcgaagttaatcgtctagacaaagaggacattacttaccacgaaaaagtacaaaatggttatgagaaaattatccaaatgtttccagatcgtttcatgcgagtggacgcaacgaagacgccagaagagattactactattattttagcagatattttaaagcaactaacttaacattccatgtgatttaagtaccaatccataagtgcatatcgctctttaaaaagggatttgtttgctataatagaaaaaagatagatttttaggaagggttgatttctttgaaactcatatttgcaatagtccaagatcaagatagcaaccgtttgtctgacgcactaacaaaaggcaatttcggtgcgacaaaattagctactacgggtggatttttaaaagcaggaaacaccacatttattatcggaacagaagatgaacgtgtagatgatgcactagcgataatcaaggaaaactgtaaagcacgcgaacaaatgatgacaccatccgcttccttaggtgtgacggtagatacgtatgtgccttacccaatcgaagtacaagttggcggcgcgacagtgtttgtaatgccagttgagagtttccatcatttttaggacagatagtgggaaagcaggtttgcgataagggctacctgtttttcttttatttcaggccttggcaaaccagtttgaaatgtgttactatgtaaatgaaaagagagccatgcgtgaacatgactcccaaacagtagcaccgttaaaaagacggtggacaaggtttaaaaattgatagataatcgtcttttcgcacccgtcaaagtgtaaagacgattatttttttggtttattaaagtctagtatcagcacaaccaatgtggcaaaagccaacattaaagtcattgcttcaaatacagacatgctttattcctttctaggagtaaaacctttgtaaaccataggcatcatcccctactgaggattagccaccgtctattcactttgctactgcatttactattatagcattcaaaattctttgacaaaagttatgtattaaaaaattttcttaatgacatacagcagagataaaatctagccatacaataaactagataaaatatggcatatacgcctccactagaaataagacgtgcacgatggacttaattgcgagtataatattttcaatcagattaactaaatttagatagtaagagaaaataaatattattaagaaagaaggttgttattctgggcttagaatggtcaataaaatcaaaagaagattatgaagaaattttgaaaattatagaaaagagtattattgattcggggataaaagatgtgaggtcatacttcaatgttttttgtgtgccctctggtatcgaaaagtggcccgatttaatggatttcaacatctatcacactaatgaagaaacttatatatattgcttattaaattcaagcctagcagaagccgagttaacgatgaaaaagattaaatgggaattggatgctttaaactatcaatgcgagatagatgaattataaccaataggctctgctattcaggaactgtttagtttaataaaaaaaccgcagacaaagcaatttctcgctttatccgcagtttcagacctacctcgctcaggagttaggttttttatattcacttaatcgtcaatttctgaccaacatgaatcatgttgcttgttaatttattccaagctttaatattatctacagttgttttatattgtcttgaaatggcccaaagtgagtcaccttttttgacagtgtatgtttttactgcagagttgcttggtttatttgtgcttggtttagcagcgtttgtgttgtttgtagttgttccagcgctaactttaagcttttgtcctggataaatgaaatcggatttcaggttgttccaagattttaagttggcgattgttactttatggttagtcgcgattctccaaagtgagtcacctttagcaaccgtgtaaactttagcgttggtgctagtgcttggtttagatgtgttggtatttgtgctcggttttgatgtgtttgtgttgcttgtagtcgttccggcacttactttaagcttttgtcctggataaatgaaatcggatttcaggttgttccaagattttaagttggcgattgttactttatggttagtcgcgattctccaaagcgagtcacctttagcaaccgtgtaaactttagcgttagtgctagtgcttggtttcgatgtgttagtatttgtgcttggttttgatgtgttcgtgttgcttgtagtcgtaccagcgctaactttaagtttttgtcctgggtaaatgaaatcggatttcaggttgttccaagatttaaggttagcaatcgttactttatggttgttcgcgattctccaaagcgagtcaccttttacaactgtataaattttagcgttggaagtgtttgtatttccagtgtttccggtattaccagtattccctgtgttaccagaatttccgccagttgttttgccgctatcgtattgcgttaaattatatcggctaattaggtcgtttaatttcgttgcataggctgtatccgttgcataagttcctgttaaagccttggttgcgtctttgtaggagttagtattacttttccaaactttggagtagtaatttgaattccagcttgggccgttacgaataactttggcatagtcttcaagtgattgatggtaagaagggtattttctgaacttagctgtgattgtgtagtagtttcctttaccgtcatcttctaatgtttgtttagtgtatgattggccgttgtaagctcctttaattccaaaaaggttatagttaggagcagagcctaattcacttgttccataagcactttctaaaattgcttgggcgatcatgacagatgcatataagtcattagctgctgcgatttgggaagaggatgcttggatagaattaataaagctttggattgtagctcctgaacgtagcgctgttttttgtactaaattataagtcgctggagtaggagaacttgttttgtcatctggattgctgactgttatgggttcagcgggtgttttttcaacttgttttgcaactggtgctttttctgtaggcgtagtggcttgttcttttgtttcagtttgttttgtttcggttttattttctactgttttatcaggtgttgctgtttcagtatttgtgttagtttctgttgaagcagttggattggctgttttagaagattcgtctgcgggtgctgtttcatcagcgctaaccattacttcaattcctggaacagtaacagaggtcgctatggctgtaactccagcaattgttgccccagttttgaatttgttactttttttattcttcttttcttctttcaaagcttctaaaatacgttcttttctcgttttttgcatggtaagtcacttccaattcttttaaatattctacctccattattacacacttcacatatcttatgactgttatcgacaaattgtaattaaattgtcaaaaaggtcggtatttgttatacttaatataagcaagtgcttacttagttgaacgggggtaaaataatgattacaaacgaatccatcatggatgcaacgctttgtatgatggcaaaaaatggcataaaaggctccacaacaagacaattagcagaagccgctggaataaatgaagcaacaatttttaaaaaatttaagaacaaagataatttaattcatatgactcttgaagtgcaatttgaaagtatgaaagctgaaatcaatcaattttttgataaagattttgagagtgccaaagtatttttacgtcaagcaagtcagtttatttcggatatttatgaaaaatatcgtgatttcatggtaatttctgttcgggaaatgggcagtaaagatatggaatttattgatccgtcaattgtcgaatatctatacgagcgggttaatcaaaaagtacaagaaatggttccaagtaagaactcatcccaagaagcagatgcaatttctttaattttaaatagtgttattttgctaatcatggtagagaaagtgcgagatgatatttataaacgcccgccaacgattacgacaactgcagatgccttagcagatgttttgttaaaattattgaaataaatcacgaaaagttaaataaaagttaaacattttacattttgtcttgcgagcatagattttctatgttaaactcgtagacgattagagcgataataaatatgtagttttgcctgttaggtgaggctcctatgcaaacacaggccactgcccaaaaatgtccaaagacgccaatgggtagaacagggattgtcggattaaggctttccataatgtggctaagagtaattctttacgttgtatagtgccaaaactttagcgaggggagtctgttttagtatgcgtatgaattcagaagtccttgccaaggttttggtaaggacttttttcatgtttgttatgaaaataattatctggaaatgaaaatctttttttcagacaattacgcttaagtaaaattcggaaggagatgaaggcaatggcccaccatcaggaagatgaagtagaagaaccggactcgtattatagtattcaagctgcaagagtgactaaccttcatctctggcgcacataaacgttattctcagcttgcctagaaagaattggaggcaaggaaaatgaaaaaaacacacgtaaaaatgcaaggtaacaatttgctcaaagaatcacaaatggatagaaataagattttagaaaaattaggtgtaatggaaacagggctaacgaacgtagaggttacagaaagactagccgaatttggtcctaatcaaacagtggaagaaaagaaagtatcgaatttacggttatttattcgggcgtttaatgatccttttatctatattttaatcatgttaatggtgatttcgtatttaacagatgatatggaagcgacaataattatgtcattaatgatcttagctagtggaattcttggatttgttcaaacgagtagagcagagcgggctagctacgcgttaaaaaatatggtgaaaaataaagtgaacgttattcggaacgatgaaatgattgtagtagcacaagatgaaatcgtacccggagatttaatcgaagtttcagcgggggatattattccagcagatgcacgcgttatttcggcgacagatttattaattaatcagtcagcacttacaggcgaatcaattccttctgaaaaatttgtggaagacaaacgcgccaatccggagctttttgaacgggaaaacttattatttatggggacagatgtgttaagtgggcacggtaaggcggttgttttacgaacaggaagcgcaacatttttcggctcattgtcaatcgcagctacagaacgtcgcggcgacactagctttgataaaggcgttaagtcaatttcgaaattactcttttattttatggttgtaatggttccgattgtatttatgattaacggtcttatgaaaggcgagtggttagaagcatttctttatgcggtagcgattgcggttgggctcacacctgagatgctaccgatgatcgtcagcacgaacttggcaaaaggcgctatcaatatgtcgtcgaaaaaagtaattatgaaagagctgagtgcaattcaaaatatcggcgcgatggatattttatgtacggataaaacaggcacgctcacagaagataaactagaacttgtaaaatacattgatagtgctggtgaaacttccgaaagtgttctaaatatggcttatttaaacagctacttccaaacgggctggaaaaacgttttagatcatgctgttattgccaaattggatgaaagtactgcatcaggatggacaaaagttggcgaaattccgtttaattttgatcggcgtcgtctgagtgtggtagtggaaaataatacagagacaaagatgattacaaaaggcgcggtagaagaaatgctcacagtatgcactcataaggaatttggcggcactatttctacactaactgaattagaaaagaatgagcttcaagaaatgtgtgcagaaatgaatcgctcaggaattcgagtaattgcagtagcgtataaaactggaaaagccggcgaatcattcactaaaaaagatgaagaacagatgattattgcaggattcttaggtttccgcgacccagtaaaagcatcgacgaaagaagcaattacacagctatttaagaaccaaattaacgtgaaggttttgacaggagataacgaaatcgttacgaaacggatttgtgaggaagtaggcataccagcgaatggatttttacttggcggggatattgaagacttatctgatgaagaactcacgcgcgaattacggaaataccacatttttgcgaaattaaccccaatgcaaaaatcgcgtatcattggtttgctgaaaaaagcaggacatactgttggcttccttggagacgggattaatgacgcaccagcacttaggaaagcggatgttggtatttctgttgatacagcggcagatataacaaaagacgcaagctcggtaattttactggaaaaaagtttaacggtattaaatgatgcggttatggaagggcgtaacgtatttggtaatattttaaaatacttgaaaatgacagctagttccaattttggtaatgtgtttagtgttttggtggcaagtgcatttattccctttttaccaatgctatctttacatcttttgctacaaaacttgctgtatgatttctcacaattaactctcccttgggataaaatggatcggtcgtttttgaaaaagccgcatcaatgggaacaaaaaggcatgttgcgctttattctatgtattgggccagtaagttcgatttttgatattgcgacgtttctaattatgtggtttgtatttagtgcgaacacggtagcagagcaagctttattccatagtggttggtttgttgtcggcttactcactcaaactttagttgtgcatatgattcggacagagaaaataccttttattcaaagtcgggcagctgctccggtaatgattgcgacactaatcgtgatggcattaggtattgtgattccgtttaccggatttggtcacagtatcggttttgtaagcttaccaggtagttatttcccatggttaatccttattcttgttggttatatggctacgatgcaactagtgaaaactctttacattcggaaattccgggagtggatttaaatgcgtgcgggccgattgctctttgtaacgtatttgcttctggcagtatggagtttgctacttgtttatagcacgagttatggggttgcaatcatgcgttacaaagtggatcctagttatttctttaataggcagctcctcttttatggtcttggtcttttgggcttgcttatttgctcgcgtataaatgtgaaattattttatcagcgggtgacgttgcgtattctttctttgggtcttctaggtctattagttttagtgcttgtaacgggtaatgcggctaataatgctcaaagatggttgtctattttcggagtgacattccagcctactgaaactgtcaaattgctattaatacttgtgattgcgactgttttcttacggaaaggttgcggggtgcgagtacaacattgggtgctaggctttttgtttcttactatagcattagtcttcttacagccggatctcggcacggctttaattttaggtgttattggggtcgctttgtttttaacaagcggagtcggcctctcgcgccttgtccgggtatttatctgggcttttggtttgataattcttatagcaacactgatttacttctttcatcctgatttttttagtgcagcaaaattgggcagatttgcttttttggatccttttaaccttgaaaacttagatgcttcttatcaacttagaaatggctactatgcgattggaagtggtgggatatttgggactggattaggaggtagcatccagaaattaggctatttgccggagccgcatacggattttattatgacggttattgcggaagaacttggtgtttttggtgttatttggacgatttttttattaatgttacttagttttaccgcactttatattgctgtttgtagtcattttattttcgattcgatggtttgtattggagttgccgcttggatttcggtgcagatgtttttgaatcttggaggagtgagcgggattattccgcttactggagttccgctaccgtttattagttacgggggtagttcggttgtcatgctttcgtgcgcagttgggtttgtaatagctgctgcaaggcggaacttattagctaaatctagagaggtcgtgtatttatgaagcgggatattcaatataatcgaattattttatcggtgttcttactgtctttagtgagttgtgtagcgatttattttgctcagaagacaaaccagtatgataccaattttttaggaatgcagttggtgtttttggtaattggggcacttacctgttttggtgtttcgcgacttccggtagagtttttgcgacatcatgcgatttggctttacgtcattatggtgattacactacttggaatactcatcccaaaccctttagtccaaaatataaacggagcaacgcggtggtatcgcttcgctggattgtccttccaaccatctgaagttgtcaaatcgatttttatttttgtattggcacattttgctgtaaaatatcaagcgcagaaatggaaacagataggcattttagcggcgcttactggggttgttttgctattaattatgaaacagccagatcttggtacgacaattgtttacggagttacggcacttgcgattattttgctcgctataaaatcaactaaattaatggttggcattataactatcattttaacgacagtgacggttggaatgtatgtagtcgtttatcatattagtttactggaaaaaattggttttcatgcgtatcaatttgcgcggatccaaacgtggcttgaccctactactgatccagatgcggtctatcaacttaatttatcgatgaaggctgttggttcggggatgatgactggtagttctggtacaaatgcttatattcctgaaagtcatacggatatgatctttagtacgattggtcatcaatttggctttgttggtgtcagtttgttgttaattttatttatgctacttattcatcaattaattatggcagctcttttgatgaagaatactttttcttcgctagttttagcaggttttgctgtaagttttgcatttaatatttttgagaacattggtatgacagtcggacttatgccgcttacggggattccgcttccttttattagttatggtgggagcgcggtgcttggtaatttcattgcaataggtgttgtattagcgattatccgatcagacgccgatttagtagaataaaaaaacagctgtttgaactatcccctaaaaaaacattaattttaggggtagtccagacaatgttgatgaaggattttttgcttggatagagaatactgtaattatatggtataatccttgtgaaatagaaaacaaactcagtaagtggaaattaaataatgggaggcagaagtatgtcttggataacgccgtacgttccaattataatagaagctgttttagttattggtattgtttttataggatttaagctttataaaaagtttggattatcaaagaaataacatgaataaaaaagacccctaaagttagttctgaaaatctaattctagggatcttttttcatattattaaataaaaagccacataaaaatagagtggaaaaaatccactctattaatagtttaactttagggggtcactacatatatgacaaccctgtttttatttgtttttataaaggtctacaatttctttcgctaaatctttgaaagtgattgcattcattaaatgatcttgtgcgtgaacgagtagaagggaaacttctgttttttcgccacgtgcttcaccttgtataagttttgtttgagaatgatgcgcttcaagtagtgcttgttctgcttgggcgatttgttcgtctgcttgagcgaaatccccttttttagcggaatcaatggctaacatagcgtcacttttggcattaccgccgaacacgatcaagctcataatagtttgctctaaatccatctgtaaacacgtccttaaagttttggtttttaaaaattattcagcagtaacgccttcagcagcaagtgcttctctttcacgacgtagctcttggatttgagcgattttcgcgaatggaaggaagattaggatagatagacctaagtttacagctgcaagtacgccaccagcgatactttgtgttgcaagtgctccaccgataattggtggtgtagtccaaggagttacgatagtacaagctggtacccaaccaatagctgttgcaaagtaagctacagttacaagtacaagtggtgccaagatgtacggaatgaacataattggattcaagacgattggaagaccaaacatcattggttcgttaatgttgaaaagacctggcgctgcagacaatttagaaactgtcatgtacgctttgtgtttacgagctacgataaagatagcaatgattaaaccgatagttgccccagttccgcctaagttaacgaaagagtcaaagaaaggtttgttaacgatgtaaggaagttctttaccagcttctagtgcttttacgttagcttcgatagctgggatgttgattgtttgcatgaacgggtcgataatgttcgcaccgtgtaaaccaaagaaccaaaggaaagcagaaacgaatgccaagagtaatgctgctggcaaggagtttgcaagacccatgaacggttcttgaactaattcatagaaagaaattactaagttagtcacaccagctgcttggaagaacgcagtgataagaccaaagatagaaacagtgatcattgcagggaataaagctgcgaatgaacgagaaactgccggtggaacaccatcaggcatgttgataattagtttcgggctaccactcaagcgagtgaagatttcagttgaaagaattgcaataataagtgctaagaaaagaccagttgatccaagaccaccagtatttgggacaccatctgcacctggagcgattgcgccaatagtgaagaatgtagctacagaaactacaccagaagataaagcatctttatcataagatttagctaagttgtaagctactgtgaaagcgataagtaatgctaagatagcaaaagtaccgttccaaacgtttccgccaaatgcttgccaagttccttcaccaaataagttattcatgaatttttggtaagctggaattgggaagttgttaattaaaacggcgaaagaccctagaatcataagtggcatagttgtaatgaaaccatcacggattgctactaaatgacgttgtccaccaattttggcagcgtagggaatgaaatatttctccataaatgcgataaaaccattcattttttattctccttttttgagggataaagtaatagccgggttaagacgaatacataatttctaaaacatggcgttattactatacctctttagttttttataattttcagctagctagctgtaattaccctcttttttacttcattaaatctaatgcttgttctaaaactttgtcgcctttcatcattccataatcaacactgttaataacagctaatggaataccttttggctccaattttttcttcatgtttccttctaagaaacgtacttgtggtccaagtaataaaacatcaatttcgtctaaatggttagctgcttctgcttcggcaactgcaaagatttttgcttcaagacctttttctgcagcggctttttccatttttgtaactagtaagctggtagacatacctgctgaacatactaacatgattgttttcatgattatttcctcctctagataattctcttaacacttatttatatatgcaagtaccgtgccaactttaaatgtggctataaaagggttttcattttgttttttgcttacacataggctttttttgtgtgtaaattttacacacatagagatattaacggaatctttatgcggagctttagaatcttaacactgtctttatgcatttgttgttaggataagggggtggaaagagtactttgaaggggtgaacggaaatgggtgttgttctagtgattgctggaataatcggtttagggttattggtatatttattttatgtgttatttagaggtgagaacttatgaagtatatcgtgatgcaagatgtgttttttattgtattgttattagttttggcggtgcctcttgggatttatatgtataaagtgatgattggggaaaaggtgtttttgtcacgagtgctagagcctgttgaacgctttggttatcggttgatgggtgtgaatgcggctgggatgtcagcgaagcgttatgctggatctgttcttgcttttagtgcggttggttttatatttgtgatggcggtgctgatgttacaagggtttttaccgcttaatccagaaggtatgaaggggcttagctttagtcttgcgtttaatacggcagcgagctttgtgtcgaatacgaactggcaagcttactctggtgaggcggctttatcgtatttttcgcagtcaattggcttaactgtacagaattttgtttcagcggcgacggggattgcagtgttatttgcggtgattcgtggctttatatggaagaaacagaaaaccgtgggcaatttttggcaagatttatttagggtgacgctttatattttactaccgctttcgcttgttttggcaattcttttggtgtcacaaggtgtggtgcaatcattcgctgattattcggtggttgaatcgcttgaaaatggagcaaaacaactgattccgcttggtccagctgcaagtcaaattgcgattaagcaactggggacgaatggtgggggctttttcggggcaaattcggcgtttccttttgaaaatccgtcgagttttactaatttattagagatgcttgcgattttgcttattcctgtggcgcttgttgtgatgtttggacgtgcggtgaaggacagtaaacaaggacgtgcaattatgacagcgatgatgattgtgtttgttgttggagtggttgcgattacgatttcagaacaattcgctggtccaagttatcaaggtgttactacttctggaagtatggaaggtaaagaggtgcgttttggtgttggcggatcgtcgctttttgcggcttctacaacggctgcttcaaatggcgctgtgaacgcgatgcacgatagcttgactccgctcggtgggctagttccaatgttctttatgcagcttggtgaagttatttttggcggtgttggtagtgggctttatggaatgattggctttattattttgacggtgtttatcgctgggcttttggttgggcggacaccggaatatttagggaagaaaattgaaccatatgatatgaaaatggtttgtttactcattttagttccaccgttattaactttatttggaactgcggttgcggtaatgatgccgagtgtgcaggcttccgtttcggcgagtggggcgcatggtttttctgaggtgctctatgctttcacctctatgggaaataataatggtagtgcttttgctggatttgcggcagacacgacgtttacaaatatggtcggcgcggtaatgatgttgctagcgcgatttatcccgctgattgcggcactttacttggctcaaaatatggctggaaagagtccggttgcagcaagtagtggaacgttatcgacgaaaaatggcatgtttatcggtcttttaattggagtagtggtgcttgttggcgcacttagtttcttgccggcgcttgcactaggaccgattgcggacttctttacaactttcaaatgaggtgaatggaaatgatggaaaatggtatttggaaagatgcgttaattcagtcgatgaaaaaattgtctccaaaactacaagtgaaaaatccagtgatgctactcgtatatgttggcgcgattttagcaacaagtctttattttcttggttttttcggaatttcagatgagaaagctggttatacgctcgcaattgcgctgattttatggtttactgttttgtttgcaaattttgcggaggcaattgcagaaggtcgcggtcgcgctcaagcagacagtttgaaaatggctcgaaaagacgttttagctcggaaattaaaaaatttagaagataaatctgatgtgatagaagttgcttcgaatgatttgaaaaaaggcgacattgtgtatgtgcttgcgaatgaacaaatcccgatggacggtgaagttattgaaggcgcggcttcggttgatgaaagtgcaataactggggaatccgcgccggtaattcgcgagtctggtggcgatagaagtgctgttacaggaggaactacccttgtttctgactggcttgttattcgtgtgacggctgtttctggggaaagtttcttagataaaatgattgcgatggtagaaggcgcttcacggaaaaaaacaccaaatgagattgcgctacaaattttacttgtgacactgtcaattattttcttggcagtttcagcgacacttttaccatttaccgaatttgcgagtaaacaagcaggggcgggatcggcaatttcgattacaaatgtgattgctttacttgtttgtttagcaccaaccactattggcgcattgctttcgtccattgggattgctggaatgagccgtttaaatcaagcgaatgttttagcaatgagcggccgggcgattgaggcagctggtgatgtggatgtacttttgcttgataaaactggaacgattacacttgggaatcggaaagcgagtgaatttttaccggtggatggtgtgacggaacaagagttagcagatgcggctcaactgtcctctattgcggatgaaactgcagaaggtcgaagcattgttgtattagcaaaagaacgtttcgacattcgcggacgagattttgctgaaatgcacgcagaatttgtacctttcactgcaacgacacgaatgagtggaatcgattatcaaggaaacacaattcgaaaaggtgcggcggatgcagttcgtgcgtatgtctctgcaaatggcggtacgtacccaaaagaatgcgatacgattgtaagtaaagtggctggcgctggtggaacgccgcttgtagtagtccgaaataataaagtgctaggcgttatttatttaaaagacatcgtgaaaaatggagtgaaagaacgtttccttgatttgcgaaaaatgggtattaaaaccattatgattactggtgataacccaatgaccgcggcggcaattgcggcagaagctggagtggatgattttctagctgaagcaactccagaagcaaaattggaattaattcgcgaatatcaacgagaagggcatttggttgcaatgacaggagatggcacaaacgacgcaccagctcttgcgcaagccgatgttgctgtggcgatgaatacagggacgcaagctgccaaagaagcgggaaatatggtggaccttgattctagcccaactaaattaattgatattgttcgtatcggaaaacaacttttaatgactcgcggagctttgactacatttagtgttgccaacgatttggcgaaatactttgcgattattcctgtgctattttacgggattttcccacaacttgaagcacttaacttgatggatttaacaagtcctacgagtgcgattttgtccgcgattatttataacgcagtgattattattttcttaattccgttatctttaaaaggcgtgaaatatcgtgaaatgccagctggaaaattattaagtcgcaatatgttgatttacggtcttggtggtttaattgcaccatttattgcgattaaattaattgatatgctattaactgttttaggaatcgtttaagagggggagagaacatgaaaagatttatgcaaatttggaagccggcagtagtgggatttctacttttaacattggtatgtggcgtgatttatccaggggttgtcacaattattgcaggtgcggcttttcaggacaaagcaaatggcagtataatagaaggaaagttagcagacggggaaacaggaaaatatggttctaccgaaattggccaaacatttactcagcctgaatacttaatcgggcgagctgcgagtgacggggcggcgactaatttaaacccaactagcgaagaacaaaaacaattagtagaaaaacgaattacttggtggcacaaactagatccagctaacaaccgtgttattccaatggaccttgtgactgcatcagcaagcggagtagatccagacatttcagaggcggctgcggcttaccaagtagaccggatttctagggaacgtggaatttctaccaaagtggttaaagaaatcattgctgaaaacacaagcaagcgattgttaggtttttggggtgagccgaccgtgaacgtattacaagtgaatgtggcattagatagtttgaaaatgtaagtagttggaggcgagcatatggagacgaatcgtccaagtccggatgcgctactcgtgaatttgcaagaagaagcagattcatcagtaggtaaattaaaaatatattttggatttgcagcaggtgttgggaaaacttacgccatgttaagtgacgccaaagatcaattagcagcaggtgtggatgtcgtggcgggttatattgaacctcatgcccgcgaggaaacgctgagaatgttagaaggaattccgattatccctcctaaagcaatcaatcataaaaatatcgcgctcaaagaattcgatttggacgaagcgttgaaacgaaaaccggaacttattttggtagacgaactcgcacatacgaatgcatcaggcgtacgcaataagaaacgtttccaagatgtggaagaattgcttcaagcgggaattgatgtatatacgactgtcaatgtgcaacatattgaaagtttaaacgatattgtagaaggcatcaccaaggtagctgttcgcgaaacgattcctgactatgtttttgatgaggcggaccgagttaagttaattgatattgaacccgatgaacttctaaaacgactagaacaaggcaaaatttaccaaccagcgcgcgcaaaaacagcgatgcagaacttcttcactagagaaaatttaaaactcttacgcgaaattgcgatgcgaaaagcggccgaccgaattagtcatgaatacgatcaaacagggatttatccagaaaaacgggcgagtagtaaatggctagtctgtattgggacgtcgccttcgtctgcaaaactcattcgctggacagcgcgcactgccgaggctttccgcgcaccgtggactgccctttatattgaaaatgaagaaaatgattacatgactaaagcggagaaaaaatgtttgcgggaaacgatggaactcgctgaacgacttggtgcggaaattgttacccttgccggacacgacattgcagaaacagtagctgagtacgcccggttgactggtgtgacaaatatcgttgtcgggaaatcgcgtcgccgcatgggtttaaggtctttatttgaagaggattttgaggatcgtctcattacgcaccttgataacgtcgatatgcatattattccctcaagccaaccgcaaactaaaaaacgtcgaatgaaaatacgttttaaaagctttctatcctggcatgatatggcgaaaatgattttactgctagcattggcaacggcgatttgtgtcggtttaagtgaattcggcattggtgatcaaaatgttattatggtatatattttatccgtgttaattatttctcgcgtaacaagtggctatgtttatggcgttatgggttctatcattggcgttatgttatttaatttctttttcacgacgccactttatacgtttaatacaattcaagcgggctatccggtgacgttcggaattatgcttttagttgctcttattacgagtgcgctcactgtccgaattaaaacgcaagctagcctggccgttgagcgagaacgtcgaaccgaagtgctttatgaaatcaataagcggctattagttatccgcaatttaaaaggaattatcgatttaaccaacgaatatattttgcatttatttagccgctccgttattttttattctgcggatcctgctaaaagtaataaagggattttcgtacaagcagaaggaaaagaagatgccagtgcgcttcttagtgcggatgaagaagctgtcgcgcattgggtatttaaaaataaaaagcgggcgggtgccgggacggatacgctaatgggggcatttggttattatatgccagtgatgtcacaaggaaaagtgcttggcgtcattggcgtttcttgctccccagaagatggtccacttacacaagataatcggatctttttacgaatgattagctctcaagtggcactagctttagaacggcaatatttatccgaagaacaacgccaaatcgtcatcgaatcagcaaaagaaaaaatgagaagcaatttacttcgggcgatttcgcatgatttaagaacaccgctaactggtattgttggagcaagttctgccttacttgaaaaagaaactgagttagataaagaaacggaacataatttaattaaaggtattaaagatgactctggctggctcattcggatggttgagaatttactttctgtgacgagaattagtgaaggattggtgagtttggaacgagctccagaagccgtagaagaaattgttggtgaggctgtcggtcgaatcaaaaaacgtttcgcagaccgaacaattcatgtcaaagtaccgcgcgaccttcttatggttccgatggatggcacgttaattgagcaagtccttattaatttaatggaaaatgcgttgcgacatggtggatctgatgcggaagtttgggtgaacgtgacgaaaacgaagaaaagtgcgatttttagtgtgcgtgataacggaaaaggcattccagaaaatcgcttgccagatttatttgatacttttgctgtggaagcgagagaacgttcggatatgtcacgcggattagggcttggtttatcgatttgtatgtcgattattcgagcgcatgacgggactttagaagcgaaaaacaacgaacatggtggggcgacattctggttcactttgccactagacggaggagatggaaaatgaacagcaaacgacttgtgctaattgtggaagatgaagaaggcattagcaattttatttcagctgttttgacggcgagcgattatgcggtgattaaagcagtgaacggcaaagaagcgctagaacagacggctagccattcgccggatgtagtgttgcttgacctaggtttgccagatgtggaaggactagacgtgcttcgggatattcgcgtttggtcgaaagtgccgattattgtcgtatccgcgcgcgatcatgaacgagaaaaagtaactgcacttgaccttggcgcagatgattatatcacgaaaccattcggcacatcggaactactggcacgcattcgaactgcccttagacacattcaaccgagcagtaaagaagcgccaaatgaccatattattcgcattcaagacctgtatattgatgacgaccgccgacttgtcaaaatgggcgacatggaaattcactttacgccgattgaatataaaattttgctcctattagcacgtcacgctggaaaagtcctcacgcatgactttattatccgagaaatttggggaccttattcaagtgaaaatcaagcacttcgggtcaatatgagtaatatcaggcgtaaaatcgaacaaaatccggctgaacctgcctatattttgacagaagtaggggttgggtaccggatggcagaagaataataatatgttatgataaaaataaacgccaggaggaattaacatgcataaaacaatccgtagcgtagacgtttattatgaaaaatatggtgaaggaataccaataataatgattcatggctttgcacctgattcgcagctgatgattggttgtatggagccaatctttgataaggaaagtccattctcgcgcatttatttggatttaccaggaatgggaaaaaccgagaattacgactcaattcaaaatgctgaccatgtactcactcttttactagaatttattgaagctgtaattccgggcgagcaatttgtactcgccggagaatcgtatggtggttatttagctcgcggaatcgcagcgaaaatgccagatagagtacttggagtcttgcttatttgcccagtcatttatcctgaaaaggaaagaagaactttacccgaacaaaaagtcatgtatcaagatgatacgtttgtacggtcgctatccaaagaagaccgagcgtatttttcaaaaagtggcgttattttaacagcaagaaactggaatcgtttcttggcggaagtgatggcgggaatgattaatgcagatggagaatttttagaccgattatccgcgaattatgcgcttagctttgatccagattaaaaagcgcaattcgatgtaccgggattattcttgtttggtcgtcaagatgatcacgtgggatacgcagacgggcttacattgcttgaaaaatatccacatgcttcttttgctatccttgattttgcgggacataatttacaaattgaacaaccaaaaatatttacaacaatggtagaggatttcttgttccgcgtgaaaccagaataagttaacctttgtgaccaccaaccatttcagaacgttttaatccagtcgctccatttagtaaactgctcgcatgcataagtgatttaaaaccatagcgagtgcgaattttatcgacagttacttctaattgctcgtgatttaatgtgcgggtggcatcttcaaatagattgagttgcagtccggtttttaaagtgagtttaccacacgaaatcgcaatggagcgcacgggttctcgttcatcgtaacgtctgaatagttgcaggaaataaggaataagagcatgactactactggtagaagggattttagcttgatggctgaatcctttttttatgctgtatttactgtagccgatacttaaatgaataacctccgtatccacatggttttgtcgtaagcgcatcgctacttcctcaaccatttcacgaataactatctccacttcagcgggaatatggtagtctttttcgagaatctggcttttcccgtagcttttactaactggaacatatttttcgtttaaaaggctgtaatcaattccgtgtgcgtgatagtaaagctgttcaccaacaactcccattgcgttttttaatacttgcggcggagtttgactgagttgatacatattgaaaatccccattttttgcagtcgaatggcagtcctccgaccaatcccgcatacatcatccaaatgtctgattttccaaatggtctcgggaacatcttcatagcgccattcagcgatgccgtcatcccggtttttggccacattatcgagcgcgagtttggcaagaagagggttgtcgccaataccaaccgtaacatacagccgcaattcctctaaaatatcacgctggattttgcgaacaatttcttccgtgctaccgaataacaggtgcgatccggtgatgtctaaaaaacattcatcaatactataaacatgaataaactcagcgggaacataacgtctgaaaatagcttgaatcattgcgtttacttttaaatatagtttcattcgcggtggtgcgataataatgcgcttatcccaagtcgggagttcatacattcttgagccagttttaatgtggtgttcttgtttcatttttggcgttgcagctaaaacaaggccaccagcccggtcggcgttactcattactactaaataagcttcaagtggattcagccgacgtttaacacactcaaccgaggcgaaaaaacgatttaatatcgatgcacaaaatatcacggcgcggcgcacggctataatcttctacttgtaccatttgtcgacactcctttcttctacgtttcgaatagcagagaaggaaagcgggacagtgccctcagagtttttaatgtaaatggtgttgttctccacgcctgaaatacgaccaataatatcattttcaggagcagattctgggtttaatggctttttctggataacaagcgtagactgatgtgtcatcgcgctagctagcacgctttcgataaattctgtagtcatagcttctttccatactaaagttggttcagcgtcttgcattgcttctgtatgctcgcttaataaaaaaccgccccatttcttcatgccgcgatcttgatagctcatatgatgacacctccaatattttcaaataattagctgttacttaaatatattatacgaacaaacgttcttgtttacaatgtgtaaatatcctcatttatgctagcaaaacgggaataaattactatttgtgaactattaataaagtggacataaaaaaagaccaagcctataaaattagacttggtcgttattattattttaagcgtggctatcttcgtatgctgtgatttgcccaacacgatttgcgtgtctgccgccttcatacgctgtttctaaccaaattttgacaatatcttctgctagtcccggacctatgactctcgctccaagtgcaaggacatttgtatcattatgttcgcgcgttgcatgggcgctaaatgtatcgccaacaagtgcgcaacgaatgccttttactttattggctgcgatactcataccaatacctgtgccacaaactaaaatcccgcggtcgacttcattattcacgactttttcactgaccgtaattgcgagccccgggtaatccactgattctggtgcttcgggtccgaattcttcataactaattccaacgctttcaagataagaaataatacttttgcgtaactcaattccgccatggtctgaagcaatggcaactttactaactgtcattttttctcctcctgccgtataatcaataccttcattatacatgaattaaagtttttcgacagtctttctgttacgccatggttttgcatgaacaataattacgtcgcaaggtgcatgagcggccgtatattcagaaacactaccaagaataaattgctctgttgctgaaagtccagttgcaccaactaaaattaaatcaggttcaaaatttcgcgttatttttttattaaaggtagtttttggtgtaccaaagtgaacaaaagtttctacatgcgtgacaccagctttttcggcctctttcttgtacatttcaactaattcttctccgtatgctttggctttttttgcataggtttgttcataatcaattagtggtgcaattcggcgtacatcggcaacaaaaccaataccaagcgtggcaccatccattttggcaaattgaacagctcgtcttagtgcggcttccgcttcgtttgatccatcaacaccaacaagaatccgtttgtaagcagacattttgtatcaccctctcaaaagtttttcccttatttacttaatacccgtaaataaaagaaagaagcatgattgaagataaaaatttgtggtactatgaggaaaaggaggtttctttatggcaaagcttgcgagtttttatccaattgtagctacaccaaaacgtgacggctataaagaatatctaccgagtgtgcagatgatagaaatttcccgggaaataatttagtagtccctgatttatgtaatgcaacaaaatgtcgcatatatacaatgaaaaacgaacatgctttgttaaaataacaatatggagggcttacaatggttaatgaatttgcttgggtacgggaggaaatcagtggtcttaaaggagtccagtattcttttaaagaagaatggggagcggagcgctatcatgttttggatcagctaatggcaatgcgtggaacgaataaagaaggacagcccattttaaccttgaagtgcgatgccgaaaaaagtgagcaacttcgcgcagaaaatccagccatcgtttccggttattacatgaataaacgagtttggatttctgttttattggaagaagaacgagataaagacttgattcgcgcattaattcagcatgcgtactcagaagcgaagaataagttgccaaaatataaacaagcggaactttttgactaatttagttaagaagttcttatttctgttataatgaaattgattgtgaaaaagaaaacaaaaaggggatgaaaagatggatattaatatgtttatcctatacttttttatttattctgttcttgggtgggcttgggaagaagttttttgctcgatttcagagaagaagttagtgtatcgtggttttctttatggaccatattgtcccatttacgggtttggggtaacgactgttttaatgatgattttaccgtttcaaaataacttatgggccttatttattttttcgatgattatttgtacggtgattgaatatgttaccgcaacgattttggaagcattgttccatacaacgtggtgggattatcataattggccgctcaatgtaaaaggtcgaatttgcttgccgatttcgattttttggggatttgcttgtattatcgttgtacgcttcttgcatccacttgtcaccgaattcgcggactgggttttaagctggggaggctggattattcctgcgctcatcgtggttctgatgcttattgatacgattaaatctgtcacaagtatgctatcattccaaaaagtacttgccgaatttaatgaaaaactaactgcccaagcaaatgaactaaaagcaagcgtaaaagaacgggcgaaagaatttgaagaaggacttttgaaaaaacaagaaaatgtcgatatgaaaattgctgaaatggaagcaaaaagaaaacaagacaaagaacttgctgctagtatgcgtaaacttaaatttaatgagcgaagaatgctaaaatctttccctaaaatgaaagtgaaacgcgcagcaccatttaaaaacttcaataaaagtattctcagagtcgataaacaaaaaagaaaataaagctatggattatgacgcaaatggtaaaatttatcatttgcgtctttttttgtgctattttttacgaaacgtatagaaagaatagaccatcttttgtatgattaagaagaaagagctcctcgcaaaactccattacttgattctcatttttgtttcaaagcagatttcgcacgtcataaaaaagtttgccaaatagatgatagggcaagctttgaaggcaataattaatcatttataaatagcgggcttgttaaaaaagtcacaagtaaagcccaatgatgtacattctttccgcaagttattgggatgaaagcgtgtacatttttattagaattagatttataattaaaacgaacaggagggaacgacatgtatttggatgagagaagtaattcacttttaaaagaacttttacgacatcctgacacatcgagtacaaacttacaagccaaattcggtttaactcgaagacaagtcgactatagtttccaaaaaattaacaactggctagaagaacagacttacccgaagattcatcgtgccgcaaatggtcgatttatcgtagaacctgacctgtttcaaatcattggtgaggaagatggcgaaaaaacagattggtatattccatcagaaaaggaacgcgccagtctaatcatcctcatgctaacaacaggaagtgaagagttatcccttaatcactttataagcgagctggaggtgagcaagaacaccgtattacgagacttgaagctggtacaaaagacacttgaaaaattcaacctcgaagttaaatattcgcggatgcgtggctatttaattgacggagacgagtggaaccagcggacggcactcatttatgcggcagaacacatcatagaaagttttggcggcgaagagtatttacaggattttatgcaagtggacgaagcgagaattaaagagcttcgggaaaaattggaacaagtcgagcatcatctgaatttgcattttattgacaataaaatgcaaatactgccttacattttagaagctgtttttcggcggatgaagaaggggcaaacaattacgacatctttcctgattgactacaatgaattgtcagatactcgggaatacggagcagcagagatttttattgaagaagagccgaatatgccagaagcagagcgaatgtacatcacattacaacttttaacttccaatgtacttccgaaacaatatttaaaatcggaggaaacgcacaagttaaggctggcactggaacaagttctaagtgaatttgagaaaaaggcttgtattcaactagtagacaaagaatcgttacttgaaaaattatttgcacatattaaacctgcgtattatcggattaagtatcatcttacaacagattacagcattttagacaagattgatcaagaattccaagccgtgcattacatcgtgaaagagtcgttagcaccattagaacgttttattggtagcaaagttcctgaaaatgaaagtatatttattacccttttcattggaggacatttaatcgaatccacggagaaattacaaacgagactaaaagcagtcgtggtttgtccgaacggattgtcgatttcgagattgatggaaaaaacattacgaagccttttcccggaaatatttttctatcaagcgatgtcgattcgagaatttgaacaaacaaagttaggctatgacattgtattttccgcagtgccactttcgaccgataagaaatttttcctaattaatcaattgatggatggaaaagagcgactcgagcttaggcgccgggtgatgcggtcggtttacttagtggatgaggtgaatatcagcgtcgatcaattaatgaaaactatttccaaatttgctgatattaaagatgctgcccgtcttgaaaaagtgctagcagactatttaatgccagttccagaagaaaacacatccaaacacgaaggtaaaagctcactcgcagatttgcttgaagtaacgcgaatcacacgcaagaaatcagtaaaagactggcatgaagcaatttatcatgcggctttaccgttactttccgcgggagtggttgagccagcctacgtggatgaaatgaaacggcaatatccggcaccgattatgaacatcattctccataatacgatagctatccctcatgctgaaacggaaaaaggagtaaatagcctcggaatgagcttgctttatctagaagaaggcctgccacttgaaggcggtaaagagctacattttatcgttgtcattgcagccgtggataaaaacgctcacttcacagctttactgcaattgatggaattatcggagaacaaaaaagaactgaaaaaacttgcggatgccagaaacacagaagaaatgcaccaaataattaaaaacttcacggacttggaaacaaaaaagacaatgtagagaagtcagaaagaattacaggaggatttcgtaatggatttagtacaatttttgaaaaaaggaatggtttgggttcaatcggatatcgagaaacaagaggacctattccaaatggtcgcagaaagtggaaagtctgaagggtatgtaacggatgactttttaacaagactaacagaccgtgaacaaacctttccaacggggctaaaattagatggatacggcgtggcattaccgcacacggatccagaatgcgttacggaacaatttatcgccgtaatcactgtgaaagatggcattccattcaaattaatggaagatgctggtcaaacggttgaagcgaatttgattttcgtactcggactaaatgaacctcacagccagctcgcggtacttcagcaattgatggggacgattcaggataaagacaatgtagccgcattactcagagcgaaagatgaagacgaagtaaaacaaattttagaaacaattaccgtttaaaaaaacaggaaaattagccgcgggaaatcgcagcaattaattaggaggaatttatcatgggacaatttaaaattttggtagcttgtggagcaggaattgcaacatcaacagtagtaacggacagagtagaacgtttggtaaaagaaaacaatgtggatgcagaagtaaaacaaattaaaatctcagaagcagcatccatgcaagacggagcagatttaatcgtatcaacaactattttaccgacaacttacaaaatcccagctattattgcaacttcttatatcactggcatgggtatggaagaattagacgaagaaatacttgcgcaccttaaataaaaggctgcgcaagggagtttaacatttatcattaaacagagaaaaaaggaggaaatattaaatggatacacttctgtcaggagtacagtatgttttaaacttggggcctacagttattttgcctattatgattttctttattgcattaattttccgagtaccagcaaagaaagcgcttcgttcagcgattacgattggtatcgggtttgtaggtattaaccttgttattagtttactatctaataacttaggtccggcagcgcaacaaatggttgagcgttttggactgaatttaacaattattgatgcaggttggccagcagcagccgcggcttcatgggcttctccagttgcagcgattctaattccaatctgtttggtagtcaacttagcacttattttcttcaaagttacgaaaacacttgatattgatatttggaactactggcactttatcgcagcaggtgcgactggttatatcgtaactggtggtaactggtggttcgcgattctttgtgcgattatctatgaagttgctgttctttggatggcagacagaacacaacctatggtagaagaattttacggcttaaaagggatctccttaccaacaggttctacagcagcattcggtttcatcggtattccggttggttggctaatcgctaaaatccctggtattaaaaacatccacgttgacccagaaactatccaaaaacgtttcggtattttcggggaaccaatgatgatgggtcttattctaggtattgcaatcggtattcttgcaggctatgacgttggggcagttgcacaacttggtatgtccatgggtgcggtaatgttcttaatgcctcgtatggttaaaattttaatggaaggtttaattccaatttcagaatccgctcgtgatttcatgaaatctcgtttcaaaggccgcgaactttatatcgggcttgatgcagcactttcaatcggtcacccagcgaatatttctactggtttaatccttgttccaatcactcttttcttagctgttatcattcctggtaacaaagtacttccttttggtgacttggcaactattccattctacgtatcattcgtagtagcatctcgtaaaggtaacattcttcactctgttttagctggaactgtagttattgcactagcgcttcttatggcaactgacttcggtcttgttcatacagaaatgatgaaaggtgtttacgaattccctaaaggagcaacacaagttagtacacttgatatgggtggtaacttctttaactgggctattcttaaattctctcaagcttgggcagctattttctaagttttgtcttaatgatatagaagaggtgatagtaacatgagagcagctgtgttatacgagaataatgtaataaaagcagaacaaattgatgaagcgacttgtgggaaagatcaagttcgtgttgaagtaaaagcagtcggcatctgtggatcggatattcataaaatgcagactcgctggaaatacccactgcctgctgtaatgggacatgaattcgcaggtgtagttacagaaattggtagcgaagtaacaaacgtagctatcggtgaccgtgttgcagggattccgcttgagccttgtatggaatgtaattattgtaaagcgggcgacttcgcactatgcgacaactaccggatggtgggatcacatttccacggcggatttgctgaaaatgtcgtaatgaaagcagacaatgtcatttctatcggcgaccttgattttgaagaaggtgcaatgattgaaccacttgctgtatcaatgcacggggtacttggtattgaaccgagacttggcgatacggtcattgtcttcgggattggaaccatcggaatcttggttgtacaatgcttacttcttgcaggcgtgaaagatattatcgccgtcgacatcagtgataaaaagttagcagatgcacgggaatttggttgtaaatataccattaatcctaaaaacgaagacttaaaagaacgcgtttttgcttatacaaatggtcttggagctgatatcgcgctcgagtgtgctggttcaaaaataacgcaagaacaatgccttcttgtaacgaagaaaaaaggtaaagttggttacttaggaatcgcctacgcagatgtacttttacacgaagaagcttttgaaaatatttttagacgtgaacttacgcttaaaggtttttggaattcttactcagcaccatttccaggtgaggagtggcgtacgtcgattgaattcgtaaaacaaggtcgaattaagctgaaaccactaatttcgcatcgttataagctagaggaaacgaaagaagcttttgatatgattctttccagagagcatgattataacaaagtgatgatattgccgcagaaaggtgacgattaatttgaaagcagtagtaaaaacaaaccccggatatgatcaaatggagctaagagatgtagaagaaccacaagtctatggcgacaaagtaaaaatcaaagtagctttcactggtatttgcggatcagatattcatacgtttaaaggtgaatacaaaaatccaacaactcccgttacactgggacatgaattttctggtgttgttgtagaagttgggccagatgtaacgagtatcaaagtgggagaccgcgtcacaagtgaaacaacttttgaaacttgtggagaatgtatttattgtaaggaacgtgattacaatttatgtagcaatcgtcgcggcattggtacgcaagcaaatggtagttttgcagaatttgttttatctcgcgaggaaagttgtcacgtgcttgatgaacgtatttcgctcgaagcagcagcactgacagaaccgcttgcatgttgtgttcattcagcgcttgaaaaaacaacgatttgtccagatgacacagtacttgttttcggaccaggtccaattggtttgttactagctcaagttgtgaaagcgcaaggggcaacggtgattatggcaggaattaccaaagatagcgaccgcttacgtctagcaaaagaacttggaatggaccggattgtcgatactttaaaagaagacttggctgaagttgtgctcggcatgacagatggttacggagcggaacgcgtatttgattgttccggcgcagtacccgcagtgaaccaaggattacctctaacgaagaaaaaaggcgattttattcaagtaggactttttgcagaaaagaaaaatgcgattgacgaagaatccattatccaacgtgaaattgcttatatcggcagccgttcgcaaaaaccatcttcttggattttagcgctcgatttactggcaaatggcaaaatcaatacggataaaatgattactaaagtatacggtttggatgactggcgcgaggctttcgaggcagttatggcaggaaatgaaattaaagtattagtgaaatcttaataatggaggatgggctgtatgaaaaaacatcaaaaaaaggataaccgtgcaaacgaatccaaagcttctcgggctcagatgttttacagtagtcatccttagaaatgagccgagaacatattcgcgtatgttctcggttccatttcattataaaacgttaaaagaaaaaaatctattaatgaaggtgaaattaaatgaaattaacaattggttgcgaccacggcggacgtagactaaaagatgccattgtgaaacatttacgtgaaaaagatattgaagttgttgatattggaacatatacagacgaaagtgtcgattttccgtcttatgcggaagaggtcgcgaatcaagtagtaagcggacaagctgatcttgggattttgtgctgtggaactggaattggtatgagtattgctgcgaataaagtcgatggaatccgtgcagcagttgtttctgatactttttcagcgcgtgccacccgtgaacataataatagcaatgttctctgcctaggcgaacgcgtcatcggcgaaggattagcacttttacttgtcgatacttggcttgaggggtcttttgcaggtgatcgccataaacgccgcttggataaaattactgaacttgaaagaaagtgaggatgaagatgaggaaaatagccgcttcaattatgtgtgcagaccaactacatttaggtgaagagctccggcgcctcgaatctgctggtgtggaactactacactgcgatgtgatggacggtatatatgtgaataatctagcactaggtccagaatatttggaaatagtacgaaataacacagaaatccccttagacatacatttggctacgattaccccacttaaatatattgacatgtacgccactgcgaaacctgaatatatctcgtttcatgtggaagtagcagaagatgtgtcagaagtaatccagaaaatccgttcttacaatattaaaccatcgatcgcgataaatccggaaacccctattgaagccatttatccgtatttagatgaggtcgaaatggtgttaatgatgacggtaaatccaggttttgcagggcaaaaattccaaacagatgtattaccaaaactgcatgatttaaaagcaaaactagaaggaaaagtgcatgcaccacttatcgaagtagacggcaatattaataaagagacagtaggcttgatgcgagattgtctaccagatatttatgtactaggcacatccgcgttatttcatgaccgagataaaacgagttatgcagaaagactagtacacatttggtcagatgtagaaaaacatgtgtaataaagcacaaacaatttaagggagatgacagttttgaaaaaaacattagatagacaagctgtggacacgattcgttcgttatccattgatatgattgagaaagcaaactcagggcacccaggaatgccgatgggagctgctccaatggcgtatatgctatttgcaaaacatttagtatttaacccagccaacccagaatggtttaaccgcgaccgatttgtcttatcagcagggcacgggtccgcgctactttatagcatgcttcatctatttggttatgatgtgaaaatggaggacttaaaacagttccgtcaattagatagtttgacaccaggacaccctgaatttggatggactgcgggagttgatgcaacgagtggcccacttggacaagggattggtatggccgctggtatggcgctggcagaatctcatttagcggctgagtataaccaaccaaattatccaattgtcgaccattatacgtatgcgatttgtggtgacggggacttgatggaaggtgtggcatcagaaacagcctcacttgcagggcatttaggacttggaaaattaatcgtattgtacgattccaatgatatttgtttagatggcgatttaagtgcaacgttcagtgaaaatgcagcagatcgtttccgtgcatacggctggcaagttttacgcgtagaagatggcaacaatttagcagcaattcaagagaaaattgttcaagcaaaattagaaacatcaaaaccaacgctaatcgaagtgaaaacagtcatcggttacggtgcgccaacaaaagcaggaagctctgcaagtcacggtgctccgcttggtgaaaaagaagcgaatggcgcgaaagaacattatgaatgggcagaagaacctttcacagtaccagctgaagttcgtgattatttaagaaattacaaagctcgcggggaaaaactagagggtgcttggaacacgatgctcgctaattacaaaaaagaattcccagaacttgcaaggcaattagaccgagtgttagcgggagaagtagcagctgattggaacgccaatttgccaactttcgaagcaggtacaaatattgcaacacgctctgcttctggaaaaatgattaacgcaattgcagccgaattaccggaacttttcgggggatctgctgacttaggttgttcgaacaaaacatttattgatgcgagcccagcatacagcattcaagacccagctggtaaaaatatctggttcggtgtgcgcgaatttgcgatgggagcaatgttaaacggaatggcgcttcatagcggtttacgagtatttggctccactttcttcgtcttctcagactatgtgcgtccagcaatgcggatggctgctttaatgcaactcccagtaacgtatgtattcacgcatgacagtatcgctgtaggtgaagacggcccgacacatgaaccaatcgaacaactagcctcactccgtgccatgccaggcctaacagttatccgcccagccgatgccaaagaaactcgcgctgcttgggaaattgctgcaaccaacacgcatggtccaatcgctcttgtactatcacgccaagacttaccagtacttgaaaatgcacaagaagaagtagatgcaggtgtagataaaggtgcttatatcgtagcaccagcaaatagttccaaaccagacgctatcattatcgcaacaggatccgaagtgtcccttgcaattgaagcgaaagccgaacttgcgaaaaaagatatcgacgtttccgttgttagtttgtccagctgggaacgctttgaaaaaacaaccgatgcttataaagaaagcattttaccaaaagaagtcacagcgagatttgcgattgaagctggagcaacattcggttggaaagaatttattgggtcagaaggcgatatgttaggaatcaatcacttcggcgcatctgcccctgcgaaagatttgtttaacgcttatggatttacaccagaaaatgtggcggatcgtgtcgaagctgtgattgcgaaagccggtgtgcgcgtatgacattcgtagcgccatctttacttgcagctgattatatgaacatggcaaactccattaaagaagcagaacaggccggagctgactaccttcatatcgatgtcatggatggacattttgtgccgaacctgacgtttggaattgatatggtcgaacaaattggcaaaacggcgactattccacttgatgtccacttaatgctctcaaacccagaaaactacattgaaaaatttgcagcagctggggcgcacattatttccgtgcatatcgaagccgcaccgcacatccaccgcgtcattcaacaaattaaagcagcgggatgtaaagcgggagtcgtgcttaatccgggaactccggcgagcgtgctggatgctattttgggcgatgtagatttagttttacaaatgaccgtaaatccaggttttggcgggcaatcattcattgattcaacgattgaaaacatgcgctacctcgataattggcgccaagaaaataacggcagctatgtgatcgaagtagacggtggcgtaaatgccgaaaccgcagaaaaatgtaaacaagccggcgtagacgttcttgtagcaggttcatacttttttggggcagacgataaagtagcatgcgttcaaggattaaaaaaataaaacatgaaaaaactaggttgcctaaaaagcgcctagtttttttctattatatagaagctattttttaattgatacatcccccgcactagcttatacttaaataaatacgacaacgaaaaggaagagatatatgacacaactagcatttcgaaacgggacagaacaggacacgaagttaattcttcgttttattaccgaacttgcaattcatgaaggcattgaaaaagatgtagtagcaaccgaatccggcctacacaaagccctttttcaagaaaagtcagccgaagtaattatcgctgaataccaaggtgagccagttggtttcgcactctttttccataatttttccacattacttggcaaaaaaggcttatacttagaagacctttacatcattccagaaatgcgcggaaaaggctttgggacacaatttttcagctatttatccaaacttgccctagcacgtgattgcggtagatttgagtggtggtgcctaaatgaaaacaaatcaggcatggatttttacgaaaaaattggtgcagaaaaaatgtcagaatggaccgtacataggctctccgaagccgaaatggaaaaactaagcaatctatgaaaggatgagatttaaatgaaatgggataaactattaaatgacaaacgccgccgcgaatccggtgtcactcgctcgaaaaacaccgacgtacgtagcgcttttgaaaatgactttcaacgtatcgtcatgagcgcatcatttcgccgtttacaagataaaacccaagtattcccactagaaaaaagcgattttgttcgtacacgactaacccattcaatggaagtaagtacgatcgcaaaatcaatgggaaacatggttacacacacgattcaagaagaaaaattagaccaagattttacaaaagatcatgcggacaaaattccagaaatccttgcttgtgcaggacttttacacgatatggggaatccgccgttcggtcattttggcgaagaaagtatccgtgagtggttccgcgacaatttagcaaccatcacttacaaaaataaaagcctagcagaaatcttaacaccgcaaatgaaagaagacttttactactttgaaggtaatgcgcaagtgctccgcgtagtttccaaactgcattatcttttcgaccaatacggcttaaacctaacatttgccactttaaacgcggtcatcaaatacccagtttcttccttaaaagtaaataaaaaacaaatcaaaagcaaaaaactaggctatttttacgcggatgaatcactttttaatgaaataacaacagcaacagaagcgcttgataaccgtcatccgctaacctacttacttgaagtagcagacgacatcgcgtacctaaatgccgacctagaagacggcgtgaaaaaaggcatcgtcaacatcacgcaaatcttaaaaggttttgaagaagtagaagagcataataaagtaactgccgcgtgctacaacgaactcaagaaaaaaagcgagcgctacgaaggacaagaagaaagtttcatcgtacaacaatggctagcatcgaacgtccgcggccaattaatcaatcgctcactcgaagtgttttacgaaaactacgacgcaatcatggcaggcacattcaacgattcgctcattgatgcttcgagcgccgaacaactcgtacaaattttacaaagcctatcattcacgtatatttaccaagacaaaggtatcgttgaatccgaaatcgccggcaacgaaatcatctccaaattgctcgaaacgttcattccagctgtgatttactacgacagcgaaaccccggaacgccaaacagccaaagataaacgcctactaaccttgatttccgacaactacctaggctgttaccgcaaaaacgcagaaggcgaaagcgaaacaatgaaactttacctgcgattacttctcgtaacagacttcatttgcggcatgaccgacagctacgcgaaagatttatatcaacgtttgaatggactaagctaattaactaaatttcaagtaacaccttgacatctaaacctcaaggtgttactatattcaaggtgcctctactataaacagaggtctgaaaataaaacagcgttgtaggtcgaacttacagccattttattttaccgaaaaaatgaaccacctggatgtgtggaactactaaataaggaaggaggaatttatcccatgcctacaattaaccaattagtacgcaaacctcgtcaatctaaaattaaaaaatctacatcacctgctttgaacaagggcctaaacagttttaaaagagaactaacagacgttaactctcctcaaaaacgtggcgtatgtactcgtgttggtaccatgactcctaaaaaacctaactcggcgcttcgtaaatatgcccgtgtacgtttgagtaatggtattgaagtaacagcttacattcctggtattggtcacaacttacaagaacatagtgttgttcttattcgtggtggacgtgtaaaagatttaccaggggtacgttatcatatcgttcgtggagcgcttgatacagctggtgttgaaaatagaggacaaagccgttctaaatacggtacgaaaaaacctaaaaaataatacttataaaatatgaaaggaggatatccgatgcctcgtaaaggtcctgttgctaaacgtgacgtgttaccagatccgatttataattcgaaactagtaactcgtttaattaataaaatgatggttgacggaaaacgtggaaagtctcaagctatcctatattccgcattcgatatcattgcacaagaaactggtaaagatccgatggaagtatttgaacaagctatgaagaacattatgcctcttcttgaagttaaagctcgccgtgtaggtggtgctaactatcaagtacctatcgaagtacgtgctgaccgtcgttctactcttggtcttcgttggttagtaaattatgctcgccttcgtggagagaaaacaatggaagtacgtgttgctcgcgaaatcatggatgctgccaataatactggtgcttctgttaagaaacgcgaagatacacacaaaatggctgatgctaacagagcgttcgctcactatcgttggtaaaaaaatcactaacaaattccaggcgtattgcctgaaaaattgttttatggaaggagaaatacaacatggctagagagttctccttagaaaagactcgtaatattggtatcatggcccacattgatgcgggtaaaactaccactactgaacgtatccttttctatacagggcgtattcacaaaattggtgaaacccatgaaggtgcttctcaaatggactggatggagcaagagcaagaacgtggtattactatcacttctgctgcgacaacagctcaatggaaaggctaccgagtaaatattatcgatacaccaggacacgtagacttcacagttgaagttgaacgttcgcttcgtgtacttgatggtgctgttgcggttctagatgcacaatctggtgtagaaccacaaacagaaacagtttggcgtcaagctactacttacggggttcctcgtgtagtattcgtcaacaaaatggacaaaatcggcgcagacttcctatattctgtaggtactttgcatgaacgtttggctgccaacgcgcacccaatccaactcccaatcggggccgaagatacatttgaaggtatcattgacttaatcgaaatgaacgcgttgtattacgaagatgatttaggaaatgaccctcatattaaagaaattccagctgatctgaaagacttagcagacgaataccgcggtaaattagtggaagcagttgctgaacttgacgaagagctaatgatgaaatacctagaaggcgaagaaattacaaaagaagaacttaaagctggtatccgtaaaggaacacttaacgttgagttctatcctgtagtttgtggtacagcattcaaaaacaaaggtgttcaaccaatgttagatgcagtacttgattaccttccagcaccaacagatgttccagctattaacggcgtattgcctgatggagaagaagctgctcgtcacgctgatgattcagaaccattctcttccctagcattcaaagttatgactgacccttatgttggacgcttaactttcttccgtgtttattctggtactttgaattccggttcatatgtacaaaactcgactaaaggtaaacgtgaacgtgttggacgtatccttcaaatgcacgctaatcaccgtgaagagatttcgatcgtatacgctggtgacatcgctgctgccgtaggacttaaagatacaactactggggacactttatgtgatgaaaaagaacaaattatcttagaatccatggaattcccagaaccagttatccaagtcgctatcgaacctaaatcgaaagctgaccaagataaaatggggcaagctcttgcgaaactagcggaagaagatccaactttccgtgctgaaactgaccaagaaactggccaaactcttatctccggtatgggtgaacttcaccttgacatccttgttgaccgtatgaaacgtgaattccgcgttgaagctaacgttggtgatccacaagtttcttatcgtgaaacattccgtaaatctgctcaagttgaaggtaaattcgtacgtcaatccggtggacgtggacaatatggtcacgtttggattgaattcggaccaaacgaagaaggtaaaggatttgaatttgaaaatgcaatcgttggtggggttgttccacgtgaatacatcccagctgtacaagcaggtcttgaaggcgcactagataatggtgtacttgcaggctacccactgattgacatcaaagcaaaactttacgacggatcttaccatgacgtcgattccaatgaaatggccttcaaagtggctgcttcaatggcattacgtaatgctgctaagaaatgtgatcctgtaatccttgagcctatgatggctgtagaggttgttatcccagaagaataccttggtgatatcatgggtaacattacttcccgtcgtggtcgtgtagatggtatggaagctcgcggtaacgctcaagttgttcgcgcatttgtaccacttgcaaacatgtttggttatgcaactcaccttcgttcaggtacgcaaggtcgtggtgtatacactatgcaatttgaccactatgaagaagttcctaaatctattgctgaagaaatcattaaagctaatggtggaaacaacaaagaagattaattgatttttttcgcaacatcaagtataactttagttagaagtattacttagtttaaatttaagctaagtaaaaaataattattgaattatcgaggaggatattttaaaatggcaaaagaaaaatttgaccgctctaaaccccatgttaacattggtactattggacacgttgaccatggtaaaactactttaacagctgcaattacaactgtacttgctaaaaaaggctttgctgatgcacaagcttatgatcaaattgatggtgctccagaagaaagagaacgtggtatcacaatctctactgctcacgttgagtaccaaactgacaaccgtcactatgcacacgttgactgcccaggacatgccgattacgttaaaaacatgatcactggtgctgcacaaatggacggagctatcttagtagtatctgctgctgatggcccaatgccacaaactcgtgaacatatcttactttcacgtcaagttggtgttccatacatcgttgtattcatgaacaaatgtgacatggttgacgatgaagaattactagaattagttgaaatggaaattcgtgatctattaactgaatatgaattccctggcgatgacattcctgtaatcaaaggttcagctcttaaagcacttcaaggtgaagctgactgggaagctaaaattgacgagttaatggaagctgtagattcttacattccaactccagaacgtgatactgacaaaccattcatgatgccagttgaggatgtattctcaatcactggtcgtggaacagttgcaactggacgtgttgaacgtggacaagttaaagttggtgacgaagtagaagttatcggtattgaagaagaaagcaaaaaagtagtagtaactggagtagaaatgttccgtaaattactagactacgctgaagctggcgacaacattggcgcacttctacgtggtgttgctcgtgaagatatccaacgtggtcaagtattagctaaaccaggttcgattactccacacactaacttcaaagctgaaacttatgttttaactaaagaagaaggtggacgtcacactccattcttcaacaactaccgcccacaattctatttccgtactactgacgtaactggtattgttacacttccagaaggtactgaaatggtaatgcctggtgataacattgagcttgcagttgaactaattgcaccaatcgctatcgaagacggtactaaattctctatccgtgaaggcggacgtacagtaggcgctggcgttgtttctaacatcagcaaataatatctgatacgattcaaaccgacaaagtcatttggctttgtcggtttttttgtgcctgaaataaaaattaacttgaaaaatatcacattttcgcataaccttaaagtagacatatctttttaccttctagaccgaaatcaaggaggtaggccaagtggtacaatttgatgctagaaatatgatgctgctcgaatcgctcgtcgtggcgaatgtatatcttgcacccgagaaattacaagaagaactaggcatttccaaacgaacactacaatatgatgttgaaaaaattaataaagaattagatgatatagggcttgatggtattcaatccgttcgtggacaaggttattatttattagaagatgaaaaatcgacaattaaagaaattcttggaaatagggaagcgagccacaaagtcttttcagcaagtgagcgtcgtatccgtattttattttttctgcttgtaacagatgcgcgtgtaattattgatacaattaatgcgtgcaatgaagttagtcgtaacactagtttacaggatattaaacagttaaaattagcgctcaaacagtttaacttagagctcgcttatgaccggaaaaatgggaatatggttcttggtgatgaacgtagtattcgtcagtttttcattcattattgtatgaataacgaagaaatagccacggcagaccagttactcgatttaatgaaaataaatccaatgattaaaaataaagaacttttcccacatttagatacaatttttgaaatattagcagtgacagagaaaaaaatcggtattcgttatacagacgaggtcattgaacgaatcggaattatgattttcttctttaaagaacgaatgaaacgcgattgttatttaaatgagcacgaagaacatgaagtagaatcttttaatattgctcaggaaatttacgagcaattacagcaaaaagagcattttaagatcaatcatgcggaaattacttatttaggcaaacttttacttggcgctagtcgcttgaatgatgatgcagctgttgaaggaaagctggatataattgttgagaaaattattgccgaatttgagcgccttgcttgtgtgaattttgaagaccatcgtagtttaaaaaaagatttattgctccatttacaaccagcatattatcggcttaaattccaaattgaatggattaatccgctgcgaacagatattaagcaaagttatagtgacgtgtatgagattacaaaaaaatcattagaaccactagaagatttactcggtgaaaaaatccccgaagatgagatagcgtacgtaacgattttgttcggcggttatctttctcgcaaaaacaatactttagttgaacggaagaaacttttaattgtttgctcgaaaggggtaggaacgtcgcggatgattgagcggcaacttgcacaattactcggtgaacgtgttgaaatattagaaccaatttccatccgtgaatttgaaaaagggttatacgcgccagactttattgtgtcgactttgccaattatggaaccgaaagcaccagttttcatcgttagtccgattttgactgaggcgcagaagcaacaactgatgaaggcgattgccccgcacgttttgcaaaaggattcggatgcgcgcatgttgtcttctgtgcttgatgtagtggatcaatatgccaaagtggaagaccgcgaaaaattggcggccaagctgaagtcggtattgttccaagtgcaatcggacagccaactagaaaaatcgccaacacttgaagaactgttgccaaaagaacgaattatttttaaagatagtgtggcggattggcatgaagctatccgagttgcgtcaaaaccactacaacaagaaggctatatatcaggaaactatcaacaagctatgattgaaaacattgaaaagctaggaccatatatcgttattgcaccagggatagcactgccacacgcgtcggtggatgacggcgcatatcgagtcggaatgagcttactgcgcttaaatcagccagtatcattttcaagtaaagcgaaggatcaagtgaagttaattattgtgctcgcttccattgactcctatacacatattaatgcgctaagccagcttactaatttaattatgaaacatcacttacttgagcagattgaacaagccgaatcagcagcagaaattgccgcaatgttaacaataaaataagcgataaagccagtgaggcagtaagatgccgcgctggcttttttgtacgctcgctaacaacgaaatgtaacagtctattctttgcactttcgaaaagaaaggaattgggcttttttaaacagagaggctacagctataataagagtgtaagttattgatagcgctatcaattagttagaagggatgaagagatatgtcttttttggataaagagcttgtgaatctgcacggatcagctaaaaatgctgatgaagctatcatgcaagcaggagaattattagtaaatgcaggttatgtgagcgaacagtacgtagaaaaaatggtggaatcttatcacgaaaatggtgcgtactttgtcattgcacctcaaatagcaattcctcatgcaagaccaactgatggtgttgaaaactctgcagtatcgcttgtcgtactaaaagatggcgtgaatttcggacacgccgcaaatgatcccgtacgattagtattcggacttgcagcaacttcaagtgaggcacatttaaaagtcattcaaaaaattgtctccttgcttagtaacagcgataacattgaaaaaatgattcattcagaagattatcaagcaattggagaattagtggagggataacgatgaaaattttagcagtgtgtggacttggtcaaggaacaagcctaattttaagaatgaatgtagaaacagttttacgcgacatgggagtggacgcagacgtagagcatattgatgtatcagctgcgcgctcgatgaatgtggatattattgtaacaagtcaagaattagcagaaacacttggaacagatacaagcgccaaagtagttatcgtcaacaactattttgacaatgcagaaattaaaacggcattatctgaagcaatcaatagttaaataagacaaaaaaaggtgggaaaaaaatggagattattacgtggattgccaataacttttttggaaccccagccatacttttaggttttatcgtacttctcgggttacttttacagaagaaaaatttaagccaagttattagcggaacgttcaaagcaattatcggattcttaattattaacgctggtgcggctgttattactggttcccttgggatttttgaaccaatgtggaaagaagtattcggacttgaaacaccgccacttgcagggtttttaggacaagaagcctttaatgctaaatttggtagtgcggtaacgcttgcgatgacactcggatttttagtcaacgtattattagcaagatttacaccatttaagtatatttatttaactggtcatatgatgttctggacaacaacgatttttgctgggattactgttcaagctgtcggtggagatattccattctggggccttgtactcttcttagcggtaatcatgggtctttactggacattacaaccagcgattacacaaccattcctacgtaaaattactggaaatgataacgttgcattagggcacacttcttccagtgtagcgattctatcggctttactaggaaaagtatttggaaataagaaaaatgatgcagaacatattaatttaccgaaaaaattagagttcctacgtgattctaacgttattacagctcttacaatggggattctgttcgtagttggtgcagtgattctgatggtgaagaaaacaccaggagcagaaaaattaatcgcagaagctggaaatcaaagctttatcgtatactccatcgttcagtcctttacgtttgcagctggtatcgccatcgttcttgtaggtgtgcggatgtttatcggtgaaatcgtaccggccttcaatggtattgcaacaaaacttgtaccaggtgcgaaacctgcactggatgcgccaatcgtttatccatatgcgccaaactccgtaattatcggtttcgtgggtgcgttcattggagcgattatctggttagtagtacttggaaatacagttggttacgtgtttgtgccaacaatgatcgttctcttcttccacggggcagttgctggtgtattcggtaactcaactggtggtgtgagaggagcattgataggtggattcctaacggcaacagttgtcgcctggggtcaatatatcatggttacgttctttattaatacgactgtaccagatacagcaatgtgggcagccgactcagatatgtttatcctcggcccaattgtcagcatgctagcgaagttattcttttaagtaaaaatcaaaacctcttccttgtctagcattcaagaggaagaggttttttgaaaggaagttttaaaaaatgagttttattcgtactttttatggagatattgcccctgaacaactgggatttacttattctcacgagcacatcgtttgtgtaccggcttactggcaagagcgagatgccgacgatttacttttggatgataaagaaaaatcacaacttgatgtacaagatttcgcggatttaggcggaaaaacaattgtcgatgcaaccgcggttgattatggcagacgcgtcttagatgtggcacaaatttccaaagaaacaggcattcaaatcgtcggaacagctggctttaacaaaagttttttatgggacggaaaaattaaaccagaactgaagccgatcataggcgattttgaaacatattatgaatggattgaaaacacttctatagacaaactaacggaattcgttgtaaatgaagtcgaaaatgggcttgaaggaacgccgtataaggccggtcaggtgaaatttggaactggctacaatatgattacacctttagaagaaaagacgatacgcgcggttgcaagagcacatcacgagacaaaagcaccaatacattctcacacagaagcgggaacgatggctttagagcaaattgagattttaaaacaagaaaatatcccgttagaatatctctctattgggcatatggatcgcaacctagacccgtattatcacaagcaagttgccaaaacaggcgcattcatgtcgtttgatggcatcgcaaaaatcaaatatgcaccagaaagcgctcggattgcagcgattctatatctagtttcggaaggctttgaagatcaaattttagtcagtggtgatacagcgcgcaaaacttattataaacattacggccacggaccaggacttgaatatattgccaaaaaatgggtgccacgctttattgacgaagctaacgaaaaaggctttgacggagaaaaattagttaaaaaattcttcgtggataacccggcaagatgttttacttttaaaaaataggaggcgaaatctgtgttatatgcagatgaaaattcttttgatattggcgcaaaaatcacgaaaacaaaaccagtccttttgccaataggagcagttgaagcccacggaccgcatttgccgctagggacagacaatattttagcgtcagaatattcagcaaaaatagcggcggaaacagatggatttgtgcttcccgtattaccctatggccaagtttggagtttgcaagatttcccgggaagtttaacgctatcaaatgaaacggtaacgaaagtagttgtagaaatcggtgaaagtctatataaacaaggatttcgcctgtttgtcccagtgagcggacatcttggaaatatggcggcgctaaaagatgcagcgcgcgaactatatgcgaaatttccggatatgatcgtcttgcacattttttacccaaatatccaaaaacttgcaatggacgtgcgcgaaggaaaagcaaaccatcatacctatattcatgcttgtgaaatcgaaacatccctcatgctctacttatcaccggaaaatgcggatatgagtcgtgctattgatgacccgcccattttaccaattgatgcggatttcacaccaacaccgtggcaaaatttcaccaagacagcagttttaggagaagcaactttggcaacagcagaaaaaggcgaatacttgatcgaaaaaacgttaaaaacatgtgtggagttgataaagcttgaacaagaaaaaattcgaaaatctaccgaaatggaataattttgcgctatttaattttttagcgaaagataaagaaaatagcttggaagtcatggaagcatcgcgcggttttgcagtaccaggaatcgttgcaacgaactatgaaacagcagaagaagccgcaaatgtggtgaaagaattacaaacaacagccccagtcatcagtgttggtcttggtggcggtggagactggcaaaactggcgtgatgtgcttcatattgctcgccttgccccaaacagtcatattaatcagccaatcgaaacagcgggattaacaaatgacttgcttccagaaacatacaccaatgcactcgttcgaccaaccggaaaagtcggtattgtcaaactatcttccggcgacgaaattaccgctgaagaagctgtcgattattgtctatccgcaaatattccgtcaatcaaatttatgagcatcgaaggaacaaagtatttagacgaacttgtttatttaacaaaagttgcagcggaaaaagggatatacggcattgagccagcaggagggattggcgccgagaatatccttgaaataacaactgccatcaagacgaccggcattccgtttttcatgccacatatctttggaaaaacaattgataaagctacaggtcgcactaaaccagaagaaatcgagaaaatttttgcagctttggaggggaaataaatgattaataactatatcgatattacgattcgcttattagaaaatattcttgataatgaagctgattatgtaaaagaagcaggagcgaaggtagccgagtccatcgaaaacgacggtgtgatccatttatttggctgcggtcactcgcatattttaacagaagaagtattttaccgagctggtgggcttgctgcgattcatccgattttacacgaaccacttatgcttcacgaaggtgctgcggcgtcatccgtactggagcgaaaaaatgattatgcgaaaacgtttatggcagaggaagatattcgctcgggtgatgtgatgattgtattatccacatctggccgcaatcctgtcccaatagatgttgctgaaattgcccgtgaaaaaggcgcatttgtcatcgttattacttcattacaatattcagctagccaaaaatcacgccacacatctggtaaacgtttatccgatacaggtgacattgtaattgataacggcgctgttaaaggagatgcagtattaaaatcagctaactttgacatagcattcgcgccgacttccacggtaactggcgctgtcatcttgcagtccatttttgccgaagcgattgaaaaaatggtgaatgataacttcacaccaccagtatttataagtggtaatgtcgaaaatgccgatgagcacaaccaagcacttgttgataaatacaatgaacgaattccgttacttggaatgaatttataaaaatagcgtccctagggtttttgtttccctagggattttttagtataataaagttaataagattagtggaggaataatatgcttacaacaagaaaagcattatattatttagataaaggaaaaacaaaagaagcgattcatttacttgaaacttgttggaatcaaaaagtgacagccgaaaataaaagagatatatttacagcaacggtattacttagcgatgtgctctaccaaagcggtgaacgttttccagaaatctatcaaaagctcatgtcgattttagaagagatgcaagatttagaagcagtcgatttcgaacgtgaaaaagctaagcaaattttcgccgagttagatgaatattttagtgaggtcgggacatttttccaagggcatagtttagcagagctttggttgaagtttgactctgaaaatgactataaagatgtgtaccctacgccgcaaagagtggctgcaatcgaagcagaactaggatataagttacctaaatcctatatctatttaatgcgtcatacacaaaatggaggcatagtttcaacgggttctgtccctacgacagagccaagttcatggtcggagaattgtgtagctattactggcattatgggaataggagactgtggagtatctacattgaatggtatgcacaacacaaatttttggacagaagagtggggttatcccgatgttggtttagctattgctgattgcccatcagccggacatgacatggttttcttagattaccgaaattgcggaaaaacaggcgagcccgcagtcgttcatattgatcaagaaggtgattataaaatacttaagctagctgataattttgaagagtttattttgagtttgtacagagaggaatattaattcaaaaacaagaaggagtgcggccgatggattcagcatatgtatttgatagcgaacaagcaacgaaattattaatgaagaactacgagttagtaaaaacaagtggcgttagttttattgataagcggattcgatttctgattgctcgcctttttgcgggaaataatgaaatcgttcaaccagaaaaattctatgaaataaataaagaatttaaacgacaactaggtatgtttacagcgttaaatggtaatgttcgcgcatcgcttgtcggcttactgatggcaagtgataacgggaaacgggatagtgtaggtcaagtgatttccaattacaacacactcatcgaagccggctttaaacgcacagaatacacctatttcgccgcttacctattactagaatcagaaaatccaacactaacagcaaaaaaagccaaaaccattcaccaacttttcaaaaaagaccacccatttttaaccaaaagtgaggacgtaacaacagctgttttcttagctaatcttaaagaagagaatgtagaaaaattagctgaagtcacagaatactatttccaagaatttgccgcaaaagggttccgaaaaaatgatagcttgcagtttttagctacaacaggaacacttttatatggtgaaaaagacagcaaatttattagaagagtagataatgtggtagaagaattacgtcaaaaaggtgtgaaaatcaagccattacattactcaagtatcggaattttagcatttgtgatggatgggcgcaaaattgactctggcttggtgaacttaattgatgacttgcaaaatcaaccgggtctgcggtttggtcgcgagtttgtaacagcactggcaatcagtctttatacagaaaaacaatcgggtcaaatgagcaaagaacaattagaaggattaatggttaatgtgcatattttaattgcgatggaacaagcagccgcaatgagtgcagccgcagcagcaagtgcggccgcggcatcaagttaataaaaaaacctggaagcagaataagtatgcttccaggtttttattattttaaggactaacataataatcattactttgttttggaggaacagaactacttaaaacataatcttttaaaaatgaattaggagcactatcccataaatccattccagcagatttaggtggagcgatgcctgcaaagaaagccatgttatttaaagccatggtatcggccattttttctttatcagtttgactatagtttttataagattcactcgtcattaagtccatcatagctttatcataaccactattataaaaagtctcataatcgtatgcatcaaagttaagcagatttttgtctgatgttccagtttcttttgcccaagcttctatatctaatttttgagattggtaggtgaatgttttgttttttgcgctataggtaaggttcccgtatttatgtggatagacggaaagagcatttgttacaatatcagtaatttctttgccgtctgaacttttggcagatcgaatgttttgggtgtggatatgcccactcaaagaaaaattcatattgccagctgtcagagcatcgattacttgttgattgtaattgattgtgtaacccttttgaataacatcattatgatcagttaaattgtggtgcataactggaacaagcgtcacgccattttttttcgctaaggcgctacattctttaatccaatctaacgtgccagctgttaaaccgccttctgtcgttggggagccttgctgcatattggttttataaatagctgtatcaagcatgaggagccaaaccttggatgaaggtgctgctaaatagcttagcgaaaaatcatcttcagaaatagcatcttcgtaaccaaaatgattataaattttgctaaaatctgctggtgatacagtatcggtcggtagttgtttgtctttctcgaattttcgagcccatggattatttatatcgtgattaccgggaacaacgaatacttgggtgcctgttttttctacttgcgctagttttttagctaattcttcatggctagttttttcgccattattagtcaaatcaccgctaataattaaaacgtcagcctttttagtctcaacatctgctaagaaagcattggttatttcatcgctatatgccaattgctttccatcaccagcggctagatatttttggaatgcctgcccgccatcagtgagtgatggggcaaaataatgaacatcggtcgtttcaattattgataaatcacggtctttttcaatcggagcagtaattttttttgtttcttcacttgcagaactacaggcaactaaggaaaaagataaaagaataggtgtcactattttaaaaaatcgaatcacgttaaatcacgctttcatgtttgtattttcacaaattgaggtaaaatttagaacaaaactcggtaagcaaagagcaatgttctaaatgtattaaatatctctatctaatatgcttttcgttaagcggtacatatcatcacgatacgcgccagctggtagttttttaatttcacgaagggctttattcgtatatttacttgcaagtttgaatgcctgttcgacacccttatatttagaaataagtgctaaaacttgttcagaagcatcatcagtcatatctagtttttgagaaagaagcggctcaaattcagccaagtgacctttcattgcataaattagcggtagcgaataaataccttgtttcatatcatttaaaacaggtttaccaagaccttcatcagtacttgtataatccaagacgtcatcaataatttggaaagccataccaagataatggccgatattataacatttcgctacagtcatgcgtggtgctttactgcccgttgcaccagagtaacaactaagagcaaatagttgagctgttttgccagaaatacgcgataaatattcgcgaactgttacatccattttataacttgtgcgcatttgatccagttcacccattaagattttttcgatatttttactgttaaattcgatattttcaacggaagaagcatgtgcggaaagaatcttaaaacaaatacagaataaataatcccctgtataaacggcataattacgaccatattttgaatggatagtagggatgccgcgacgtaatggtgaatcatcaacgacatcatcatgaatcaacgtcgccatatggagcacttcaagagcagctgcgatagaaaccgcgcgttctttatcaaactcaggtccagcttgagcagataacagcgcaaaagcagggcggagtaattttccaccagcatgaattaaatctttcacgtttttctctacatgtttatcgcgaatttgaatgttgctttcaattgtttgtaatacttcttgtaaatctttggaaagtgcaggataatcatcccacatagcatgaagttgcatattgaactcctttttttaaaattatttttgtgctgcttgactttgtttagcatcagcgaacatccgcaaagtttggacatttttcagcaagtagtttgccgcaatcccaaccgcgattccagaaagaataccgataaaagataatacaggtaaatagagcataaccgaccaagtccccgcaatccaacttgcaataacgagttgtccgacgttatgtaaaatcccaccggtaacactaacgccaatgatgctcacgcgtttcggtccaagttgttgtacaagccacatcccaagaaaactcaagatagctcccgccgcactatacataaatgttgaaatagtcccaccaagcaaagtggacaacaccaatctaatgcagataatcataaatgtatcttttgccgataacgtataaagcgaaatacaagtaataatattagcaagaccgagtttcgctccaggagcaaacgcaaatggaaacggaatggctctctcaagtaaactaataacaacagcttgtgcagccagtagcgctatatatactaatcgtctgttttttgtcataaaaacactttcctatctattagaggataaggtcaggaagagataattggatcatctgcatcacctgaactcccgtcactcgcttttacttcaatcactaacttatgtggaagacaaacgactgtatcaccttgtttatcaattgccccagttcgaacgcaaacctgatcgttgcaattagctttactgattcgaatttcttctcccgaaacctcaatcgtgttagtatgtccatcaggttgtttcacatcaaagctttcagtccctttatgcccagtaagcgtaacggttttatattccttactatcaaccgaaataactgcgacaagctctttttttccattagctggagcaggttcattcgcttttacatatgaaaaaatagcaatcggcaaaaaggaaagtatgcaaagagataaaataattataatatcccagcgtttcaccatataaaagtactttttcaccgcattgcctcctttccaaatgtcatgtacaaatcctattttaaaggataacgcctaaatataataggaaaaagttcataaaaataaacaaataataaaaacggaagcacctcctatgccaaaactggcttttggatgcactcccgatttttaatttaaaattttaactagctaatttacttgtctctgtaaacggacctcggcttaccgtaccaccagtgaccaagatgtttttggaaccaaggaacagcccaataatcaagaccaaatgtacgtccagcgccatttagaagtgcgatagaagctggtaacgcccagaatttgtcccaaccaagcatagcgcttagagtgaacattactaggaatccagcacttccgatacttacaagccaagtgaatagaccaactaccatagcaagaccaattgcaagttcaacaaaaggtacaactttttgcattactagagcaacgtcaaggtttggcataagaagtttcataatccattcaaaccaaccaggcatatggctaagaattggtgtagttacgtttgtcgcagcggcaccagcagcatcaccggcagcttgactagcgccagatgttgcagcagtttgtaaccattcaaaaggcatttttgaactagttgctgttaaccaagaatcagaaccaataccattaaatagaggttttaagttagtaatacttactttatcccatgtagtttcaccgtagattttagaaagagcttcgtcaatccagaaccaacctagatatacacgtaaaggaagaacccaaagtacgttaccgtaacgagaagtccaaccacggaagatattacggtgatctttaatgtggaagaattcgtgcataatatattgccacatgtaataaccactgcgaataccaaagaagtaataaaggttaaccatatgtttcattaaaatagcgaaccaaccagatagatgcatgccaccaaggtgagcaacaccgtatttagccccgatagataccatgacaccatgatatttaccttggaatggttctttttcgccagtaccactcatttcaacgatgatgcttttcgctgcagttaatgcagtttgttcagcaccttcaacgatttgtggagttggcttgccatcttcatcttcaaagtaagcaaggtcaccaacaacataaacgtctttaagaccttctgcttccatatattgatttactttcaaacgtcctgcacgagcagattccatgccataatcttttgtatcagagttagcacgaacaccagcagtccaaattaatgtacttgttggaagctcttcgccagatttaagaacgatgctttcaggtttaacttcaacaattgcagcgtttttcatgatttcaataccttttttaaccatgtaacgttctgctttgtcagcgtctcttctttcaagcatgtttaggattgttggagcagcttctactacaactagtttaatttcagatgcgtcaattttgttatctttagctagacgatctttccattctaaaagttccccaaccatttcgataccagtaaatccagatccacaaacaacgaatgttaacattgctttacgtttttcaacgtcttgttcgcgagatgctttagttactgtttcttcaatatgattgcgtaatttaacagaatcttcccaagaccaaagtgtaaagccgttttcgccaacaccaggagtcccgaaatcattaggttcgccgcccataccaagtactaggtaatcgaacggatagcttccgtgttctgttgttacaactttcttatcgtgatctacatgtgtcacgttgtcagttacaagattaacttttgttctattaaacaaacgacgtaaatcatattgaattgcagttggttcaacacgaccaccagcaacctcatgaagttcagtcatcattgtgtggtacgaatgacgatcgattaatgtaatgttgacgtctttgtctttcttgtatttcttagctaatttcttagcagcgtgtacacctgcatatcctgccccaattaaaacgatattcttttcaggcatatgcttcctcaactccttgtaagtttattcacaaaaataaaatgagtccaaaattccccacagtattattataacctatcatagtttaacagaaacctcctactaatgtctagatagtaaagaacaattctaatctaaaacccgaaaaataggactttatacaaaatttatatatttgagcaggctaaaagtccttgttttatctaggttgttagacatttttgtatgctattttgctagaaaatgatggttttacccaagttttatgtatcaatagtcattattttgaaaattagatgaattatgtctttagaattacagtagacaaaagcgcacgctgatggtatcatttgtattgtaaaagtgatatcgctttcgcagactatccgtttgtgttcacgttatcacaaacaaggttttaataaaacaaaaggtgggagcaaatatgaaattgaaaaaagtagcaatgggtattaccgtagtaatggcttcaagtttattactagtaggttgcggtagtagcgacgacagcagcaaagataagaagagcacagacacaaaacaaacagaaacaaagaaaacagctaaaacagatggtactatgactgatggtacttacaaattagaagaaaagaatttcgacgacaaaggctggaaaggtttcatgtcaatcgaagttaaagatggtaaaatcactaaagctaactacgattacaaaaacaaagacggcaaacttaaatctgaagatgcagactacgaaaaagcaatgaaagacaaagtaggaactggtcctcaagaatacttgaaacaattaagcgattcccttgttaaaggacaatctgcatcatctgtagaagtagtttcaggagcaactcattcctctgacgctttcatcaactacgcaaaccaattaattcaagcagctcaaaaagctgatacaactacaatttccatcaacaacctagctaaaatggaagatggaacttataaattagaagaacaaaactacgcacatggttaccgtgtagtattcagcatggacgttaaagatggcaaaatcactaaatctgattacaactatgttgacaaagacggtaaacttaaatcagacgacgctgactatgagaaaaacatgaaagctaaatctggtactggtccaaaagaatacatcccagcacttaataaatctctagtagagaaacaagatgttgctgcagtagacacagtttctggtgctactaactcttctaaccaattcaaaatctacgcagctcaacttcaaaatgctgcacaaaatgggaacactgacactatcaaagtgtacaacctagtagaagctgaataattagtacaatgaaaagcacaaagcggctggccctaattctggggctagccgatttttttatcgcaaaacagaggaattaagcctttttactgtagatttattcctttttttacgctatagttattcaagtaaagatcacggattagaaaggtgaaaaagctaatgaagaaatggaaaataatactttcagttatcgtattggcacttgttgtgtcggcatgcggaaattctaataacgattcaaaaaaagaaccaagtgattctaaaacacttttggaacagccttactctaaaactgatttcctaatgggaacagtagtcacacttaaaatctatgacaaaggcaaagaagacgttctagacaaaggtttcgatcgcattaaagatttagcagctaaaattactacaagcgatgcagaaaaaacatcggaagttgacaaaataaacgaacaagctggaaaaaaaccagtaaaagtttctaaagatgtctactatttaatccaagaaggactgaaatactcggaaaactctggtggtagctttgacattaccattggaccacttacttctttatggcatatcggtttttctgatgcgcgcaaaccttcgcaagcagaaatcgatgcagttttaccattaattaattataaagacgtaaaaatgaacgacgaagaccaaactgtctacttggaaaaagaaggcatggagcttgatttaggagcaattgcaaaagggttcatcactgacgaaacattaaaagtgttcaaagataacaaagtaactacttccataattgatttgggcggaaatatttatgttcaagggaaaaatcctaatggcaataaatggaatgttggaatacaagatccgttttctccgcgtggtagtgtgattgggaagcttccagaatctgatatgtcgattgtaacttcgggcatttatgaacgttacctagaagtggacggaaaaacatatcatcacattttagacccgaaaacagggtacccgtttgataatgatattgctggcgtgtctatcgtatctaaaaaatctattgatggcgatggcttgtcaacagctactttctgcaaaggaattaaaggcggaatggattacattgagcagtttaaaggtgtagacgctatctttattagtaaagagaaaaaagtatacgaaacatccggcctaaaagggcaatttgaattaacagataaaaatttccaaatggacactttgaaaaaataaaccattatatatagaagaaagtgagcagacttctaaccgagatctgctcataataaggtagagaggggttaaaaaggggttatgtcaatatcatcattcctgaagttggttgaaatccagacgaagatagctagcgtatttccgtttatgttaggggtgctatttgttgtgtatcaatatgatatgtttaagcctattaatacgttgatattttttggctctatgctaatttttgatttaacaactaccgcaattaataattatatggattaccgtaaagccacagataatcatgactacgactacaggacaacaagcaacgttatcgggcaacaacaaattccagaacgaacagttattattactatttttctgatgtttttcattgcaactggtttaggtgtttggcttgttttccgcactgatttgctagtgctattaattggatttgtatgtttctgtattggtatcttgtatacatttggtcctgtgccactttcgcgtatgccgcttggagagattttttcaggggttacgatgggattcgggattttcttcttagctgtttatgtaaatgcgtacgatgccggaattgcgaatttactttggcaaggagaaatggtaaccatccagttcaatctaatagaaatcatccggataggtgtggtatccttaccatgtattttcacgatagcgaatattatgctagccaataatttgtgcgatttagatgaggatattagaaatcatcgttatacacttccttattatataggtagaaaaatgggagttcttctttttaatgcactgtactatgcgtcgtttttagcagtggttgtttcggtgtttattcatttcttgcacccaatcatgctagtgtcggtactggctgtttatccggtctatcgtaatttggttaaatttaataaagagcaagtgaaatcaaaaacatttgttattggtatacgtaattttgtgctgattaatgcgactttaacaatcttaatggcggttagcgttgtaattcaacaattgacgtgagtgaagggggcttctttgaatgatagaaaaactgatattaggtcgttttgttccaggggagtccttaattcacgggcttgacgcgagaacgaaattgctagctgggttttattacattggaattttatttttagcgaataattggtggacatacgctttaatggtcttattcacactaatgattgttcaaatgacggggataaagttgaaagtgttcataaagggagttaaaccgcttatttggttaatcttattcaccgttgtgatgcaaatcctgttcgcgagtggtggaacaatttattttgactggggtccttttacaatttcgtctttcggtcttttgaatggtgtttttgtgtttttacgctttgtattaattattattatgtcgacagtcattactttaacaactaccccgatgaacttaacagatgcaattgcgtatatccttcgtccttttgcagtgctcaaagtacctgttaacgacatcgccttaatgatctccgttgcgctacgttttattccgacacttatgggtgaaacggataaaattatgaaagctcagcgcgcgcgtggagttgattttggtgaaggaaacttattcgaacaaatgaaagtggttgttccgatttttattccgcttttcgttagttcctttaaccgggccgaagagctagccgacgcaatggaagctagaggttatcagggcggggaaggacgaactcgtttccggatacttcactggcactttggcgatcttgttgcgctaggtgtcatgttgcttctaacagccggacttatattgcttcgtacttcttaaaaacattcgaatcatcggatgtttttttattttatttaaaaactatagattgctgctatgaagcgtttcttgccagatattaaaccgagattcttctatataatagcttctatgaaaataacttaaaacttttttcaaaaagcggttgattactacccctaacccgtgtataatagataaagtgcaaatggacaggcattggtctgcccttttgacaacgagcaccccggtattgccgggaatgcccatgtgatgaagtgaaaggttgctgacacacccggccgctttgccatggcggatgttcaggtaattttcacggagaatgtctactttgaaagtaggcgaaaaggagggaaagtaatggcaaaacaaaaaattcgtattcgtttaaaagcgtatgatcaccgtattttggatcaatcagcagaaaagatcgtagaaacagcgaaacgctcaggtgcttccgtatctggtccgattccacttccaacagagaagtctatctacacagtcttgcgtgcggtccacaaatataaagattctcgtgagcaattcgaaatgcgtacacacaaacgtttaatcgacatcgttaatccaacaccacaaacagttgatagcttgatgcgtttagacttgccaagcggtgtggacatcgaaatcaaactataataagaatatattaaattaacaggaggtgtgactcatgaccaaaggaatcttaggtagaaaagtagggatgacacaagttttcactgaaaacggcgaacttattccagtaacagtaatcgaagcagcacaaaacgtggtacttcaaaagaaaactgttgaaactgacggctatgaagctgtacaaatcggtttcgaagataagagagcaaaattgtcaaacaaacccgaacaaggtcatgtagcaaaagccgatactactcctaagcgcttcattcgcgaattccgcgatgtaaacttagacgagtatgagattggtgcagaagtaaaagtagacgtattcgcagaaggtgacatcatcgacgcgacaggcgtatcgaaaggtaaaggattccaaggtgttattaaacgccacggacaatcacgcggccctatggcccacggttcccgttaccatcgtcgcccaggttcaatgggtccagtagcacctaaccgtgttttcaaaaataaactacttccaggtcgtatgggtggagaacaaatcactatccaaaacctagaaatcgttaaagtagacgttgaaaagaacgttcttttagtaaaaggtaacgttccaggcgctaaaaaagcattagttcaaattaaaactgctactaaagcaaaataattcatttggaaaggaggactaacgaatgccaaaattaagcttacttaaacaagatggaacaaacgctggcgaaattactttaaacgacactgttttcggtatcgaaccaaatgaaaaagttgttgttgacgtaattttgagccaacgtgcatccctacgtcaagggactcataaagtgaaaaatcgttcagaagtacgtggtggcggacgtaaaccatggcgtcaaaaaggtacaggtcgtgcccgtcaaggttcaatccgttccccacaatggcgcggcggtggtgtcgtattcggcccaacacctcgttcatatgcttacaaattacctaagaaagttcgtcgtttagcgattaaatcgattctttcttctaaagtaaatgaagaaaaattagttgtacttgaaggtttgactttcgatgcacctaaaacaaaagaatttgcggcttttcttaaaaatatctctgtagatactaaggcactaatcgtagttgctggtgaaagtgaaaatgtagaattatctgcacgcaacttacaaggcattacagttattccagctgaaagtatctcagtactagaagttgctaaacatgataagttaattatcactaaagcagctgtcgaaaaagtagaggaggtgctcgcataatggatgcacgcgacatcattaagcgcccagttgtaactgaagaatctacaagcattctcgacgataagaaatatacatttgaagtagatactcgcgcaactaaaacgcaagtaaaatacgcaattgaagaaattttcgacgtgaaagttgctaaagtaaacgtaatgaattacaaaggcaaacttaaacgtatgggccgttatgcaggttacactaacaaacgtcgtaaagcgattgttactgttacagctgacagcaaagaaattcaattctttgaagtataattcgactaactttaaataattctaacgaggaggggaaacaatggcgatcaaaaagtataaacctaccactaacgggcgccggcatatgacaagttcagatttcgctgagattactacaagtactccagaaaaatctttactacgtcctcttaaaaagaaagccggacgcaataaccaaggtaagttaactgttcgtcatcacggcggtggccataaacgccaataccgcgtgattgatttcaaacgtaacaaagatggtattcctggacgcgttgcaacgatcgagtacgatccaaaccgttctgctaatattgctctaatcaactatgctgatggagaaaaacgctacatcatcgcagcgaaaggccttgaagtaggtcaaacaatttattcaggagcagaagctgacattaaagtcggtaatgcactagaattaaaagatattccagtgggtactgttatccacaatatcgaaatgaaacctggtaaaggtggacaattagtacgttctgctggaacaagtgctcaagtacttggtaaagaaggcaaatacgtattaatccgcttaaactccggtgaagttcgcatgatccttgctacttgccgtgctacaatcggtcaagttggtaacgaacaacacgaacttatcaacatcggtaaagcaggtcgttcacgttggatgggtaaacgcccaactgttcgtggatctgtaatgaacccgaacgatcacccacacggtggtggtgaaggtaaagctccaatcggtcgtaaatcgccaatgtctccatggggtaaaccaactcttggatacaaaacacgtaagaaaaacaacaactccgataaatttatcgtacgtcgtcgtaagaaaaaataatcggattaatagattgaataaaattggtagcaggatagcgaggacaagcgttctcagcttcctgactatgcgaagggaggttccgtcatgggtcgtagtttgaaaaaaggaccttttgttgatgaccacttgatgaagaaagtggaagcagcagcagaaagcgaaaagaaacaagtaattaaaacttggtctcgtcgctccacgattttcccaacttttgttggacaaacaatcgcagtatatgatggacgtaaacacgttcctgtttatgttcaagaagatatggtaggacacaaactgggcgaattcgcaccaactcgtacgtaccgcggtcatgcgggcgacgataaaaaaactaaacgctaatttgagaggaggatatcctaatggcaagtgaagttacaagcgcaaaagccgttgccaaaacggttcgtattgctcctcgcaaagctagaatcgtcattgatttaattcgaggcaagcaagttggcgaagcaattgcaatcttgaagtatactccaagatcagcttccccaattattgaaaaagtattaaaatccgctattgctaacgcagagcataactatgatttagacattaacaaccttgtagtagaggaagcatttgttgacgaaggtccaacacttaaacgtttccgtccacgtgcacaaggtcgtgcaagtgcaatcaacaaacgtactagccacattacagttgtggtatctgaagtgaaggagggataattcgtgggtcaaaaagtacatccaataggtatgcgtatcggtgtcatccgtgattgggactccaaatggtacgcggaaaaagattatgcggacttcttacatgaagatttacgcatccgtgattatgttgcaaaacgtttatctgacgcttctgtttctcgcgtagaaatcgaacgtgcagctaaccgtgtgaatatcactattcatactgctaaacctggtatggttatcggtaaaggtggttctgaagttgaagcattacgcaaaaacttaaacgaacttactcaaaaacgtgttcatatcaatatcgtagaaatcaaacgtgctgacctagacgcaaaattggttgctgaaaacatcgctcgtcaattggaaggtcgtgtatctttccgtcgtgcgcaaaaacaagctatccaacgtactatgcgtgctggagcaaaaggtatcaaaactcaagtatctggtcgtcttggcggagcggatatcgctcgtgctgaacactatagcgaaggaacagtacctcttcatacattgcgtgccgacatcgactacgcatgggaagaagctgacacaacttatggtaaactaggcgttaaagtctggatctaccgtggtgaagtccttcctacgaagaaaaacaatgtggaaggaggaaaataataatgttagttcctaaacgtgtaaaataccgtcgtgaattccgcggaaacatgcgtggacgcgcgaaaggcggaactgaagttgcatttggtgaatatggtcttcaagcagttgaagcttcttggattacaaaccgtcaaatcgaagcagctcgtatcgcaatgactcgttacatgaaacgtggcggtaaagtttggattaaaattttccctcataaatcttacacttctaaaccaatcggggttcggatgggtaaaggtaaaggtgctccggaaggttgggtaagcccagtcaaacgcggcaaaattatgtttgaaatcgcaggtgttcctgaagatgtagcgcgtgaagcattacgtctagcagcacacaaactgccggtcaaaactaagatcgttaaacgtgaagaaattggtggtgaagcaaatgaaagctaatgatatccgtgatttatccactaccgaaatccaagatcaagaaaaagctttgaaagaagagctcttcaacctgcgctttcaattagctactggtcaattagaaaacaccgcacgtattcgtgaggttcgtaaagcaattgcccgtatgaaaacaatcgttcgagaaagagaacttgcttaaaaaagaatcgtaaggaggttttaatacatggctgaccgtaaccaacgtaaagtttatactggtcgtgttgtatccgataaaatggataaaacaattaccgtggttgttgaaacgtacaagaaacatggtttgtacggtaaacgcgtgaagtattctaaaaaattcaaagcgcatgatgaaaataacattgcaaaaactggcgatgtagttcgtatttccgaaactcgtccattgtctgcaactaaacatttccgtttattagaagttgtagaagaagcagtaattatctaaatcaaaagttaaaaatagattgtgaaaagttgccgagtgcaatttttccgacccgttattctggaaggagggtgtcctaatgattcaacaagaaagtcgtatgaaagtggctgataactctggcgcacgtgaagtgttaactattaaagtgctaggtggatcaggacgcaaaactgctaacattggtgatgttgtcgtgtgtaccgttaaacaagcaacaccaggcggcgttgtcaaaaaaggtgaagttgttaaagcagtaatcgttcgtactaagagtggagcacgtcgtcaagacggttcttacatcaagtttgatgaaaatgcatgtgtcattatccgtgacgataaaagtcctcgtggaacacgtatttttggacctgttgctcgcgaacttcgtgaaaacaactttatgaagatcgtttctttagctccagaagttctttaaaaattaagttccaagaaatcaaggaggtgctataccaatgcatgtcaaaaaaggtgataaagtaaaagttattactggtaaagataaaggcaaatccggcaaagtgctcgcagcatttccgaaaaaggaccgcgtacttatcgaaggaatcaatatggttaaaaaacatactaaaccttccaacatcaacccgcaaggcggaatcttgaatgttgaagcaccaatccatgtttcaaacgtaatgctaattgaccctaaaactggcgaacctactcgtgtaggctacgaagttaaaggtgataaaaaagtacgcgtagcaaaaaaatccggtgaagtaatagataaataatagtcgtaggaaggagggaatattacatgaatcgccttaaagatcaatatcttaaggaaattgttcctgctttaatgagcaaattcaattatgactccgtaatggaggttccaaaaatagataaaatcgtaatcaacactggtgttggtgacgctacagcaaatgcgaaagtgttagacagtgcagtggaggagttagctcttatcactggtcaaaaacctgttatcacaaaagcaaaaaattctatcgctggtttccgtcttcgtgaaggaatgccaatcggtgctaaagtaacattgcgtggtgaacgcatgtatgatttcttagataaattagttactgtttcacttccacgtgttcgtgatttccgtggcgtatcgaaaaaagctttcgatggtcgtggtaactatacgttgggtgttagagagcaacttattttccctgaaattgattacgatcaagtatcaaaagtacgcggtatggacgtagtaatcgttacaactgccaaaagtgatgaagaatctcatgagttacttactcaactagggatgccatttcaaaagtaatcaaaactaatttagtagggaggcgaaaacgtggctaagaaatccatgatcgcgaagcaaaaacgtacaccaaaatacgctgttcaagcatatactcgttgtgaacgttgtggtcgtccacattccgttattcgcaaatttaaattatgccgtatttgtttccgtgaacttgcctataaaggtcaaattcccggcgtgaaaaaagcaagctggtaagaaagagtttaaggaaggagggtattatacatggtgatgacagatccaattgcagattttctaactcgcattcgtaatgcaaacatggttaaacatgataaattagaactgcctgcatccaaaatcaaaaaagaaattgctgaaatattgaagcgtgaaggttttatccgtgacgttgaatatattgaagatgacaatgctgggacaatccgtgttttcttaaaatatggtgcgactggcgaacgtgtaatcactggtttgaaacgtatcagtaagccaggtttacgtgtatatgcaaaatcaactgaggtgcctaaagtacttaacggtctaggtatcgcaatcgtgtctacttcccaaggcgttttaaccgacaaagaagcccgtgctaaacaagtcggcggagaagtactagcatacgtttggtaagaaaaagtaaaccataaggaggtgcaataaatgtcccgtataggtaaaaaaactattgtgattcctgcaggtgtaacagttacacttaatggatcaacagcaacagttaaaggtcctaaaggtgaacttgtaaaagagttcaacccagaaattactattaatattgaaggcaacgaaattaacgtttctcgcccgactgataataaaaaccaccgtgcacttcatggtacaactcgtgctattcttaataacatggttgtcggagtttccgagggttatgaaaagaaattagaacttatcggtgttggttaccgtgcgcaaaaacaaggagacaaacttgttcttaacgtagggtactctcatccagtagagtttgttgctcctaaaggcgtagaaattgaagttcctgcaaacactcaagtgattgttaaaggatacaacaaagaacacgttggcgagttagctgcaaacattcgtgccgtacgtccaccagagccatataaaggtaaaggtattcgttacgaaggcgaacatgtacgccgtaaagaaggtaaaactggtaaataatgccgcttaattaggcaaatgagagaagaggtgagtcgtgtgattaccaaaatcgacaaaaataaagtacgtaaaaaaagacatgctcgtgttcgttctaagatttctggaactgaaagtcgtccacgtttaaacgtattccgttcaaacaaaaacatttatgctcaagttattgatgatgtaaatggtgtgacacttgcaagtgcgtctaatttagataaagatttcggttctgctgaatccaaagttgatgcagcaagcaaagttggcgaactagttgctaaacgtgcttccgaaaaaggtattacttctgtcacttttgaccgtggaggatacttatatcatggccgcgtaaaagctcttgctgaagcagctcgcgaaaatggactagaattttaataagaaggagggacatattacatgcctgagcaaattgatggaaacaaattagatttagaagaacgcgttgttacaatcaaccgtgttgctaaagtagttaaaggtggacgtcgtttccgtttcacagcacttgttgttgttggagacaaaaatggtcatgttggtttcggtactggtaaagcacaagaagttccagatgcaatccgcaaagctgttgaggatgctaaaaagaacatggtgtttgtaccaactgtagacacaactattccacacactgtagtcggacattttggtggcggagaaattcttcttaaaccagctagtgccggttctggtgtaactgctggtggtcccgttcgtgcggtcctagaacttgctggtgttgctgatgtatcttccaaatcgcttggatctaatacaccaattaacatggtacgtgctacaatcgacggaattaaacaacttaaaaacgctgaagatgttgcgaaacttcgtggcaaaacagtagaagaattgttaggataaggagggaattatcattatggcgaagttagaaattactctaaaacgtagcttaatcggacgccctcaaccacaacgcaaaactgttcaagcattaggtcttggtaaaacaaattctgtagtggttaaagaagataatcctgcaattcgtgggatgatcactaaagtaagtcatttagtggacgtcaaagaagtttaagcttaatataataatatgtaattgatagaatttgttaaataggaggaggtgcttgacatgaaactacatgaacttaaaccttcagaaggttctcgtaaagaacgtaatcgtgttggtcgtggaacaggctctggtaacggcaaaacttctggacgcggtcataaaggacaaaaagctcgttccggtggtggcgtacgcctaggttttgaaggtggacaacttccacttttccgtcgtattccaaaacgtggattcacaaatatcaaccgtaaagaatttgctatcgttaacttagatgttttaaaccgctttgaagatggtacagaagtaacaccagaacttttaatcgaaactggaattattcgtaacgaaaaatccgggattaagattttatctgatggaaatatcgagaaaaaacttactgtgaaagcgaacaaattctctgcagctgcaaaagaagctattgaagcagccggcggaaaaactgaggtgatctaatgtttcaaacgttagcgaacttcttcaaagtagcagacatccgtaaaaaaatactatttacattagctatgctagttattttccgtattggtacattcgtgccagtaccgggagttaacgcagctgctttacaatctagtatggatggcggtattttggggttcttaaacacatttaatggtggggctttaaaaaacttctcaatttttgccatgggtgtaatgccttacattacatcttccattattgttcagttacttcaaatggatgttgttcccaagttaactgaatggtctaagcaaggggaaatgggtcgtaaaaaactcaatcaacttactagatacatgacgattggacttggtttaatcgaagcattcggtatggcatacgggtttaaccgcatgtcatctgctggtttggttatcgaaccatccatcggtagatatgtgattattgcaatcgtattaactaccggtacaatgttcttaatgtggttaggggaacaaatcactgttaaaggcgttggtaatggtgtttccatcattatctttgcaggtattgttgctcgtattcctgatggagtgcgtcaattatatgtttcgcaaattgaaaacgctggtgatcaactgttcttacacattttaacgttagcaggtgtgggagttgcgattctagctattgttgtagctgttatcttcttccaacaagcacttcgtaaaattccaattcaatactctaaacgtgtggcaggagcaaaacaatcgggcgcgcaagcaactcatttgccattaaaacttaactctgccggagttatcccagttatctttgcaagtgcatttattattacaccgcaaacaattcttactttctttgatcaaagtaacgacattgtaaaagtattgaaagacgtgtttgattacacaaaaccaattggtatgattttatatgttgcactaattgttgctttcacttatttctatgctttcattcaagtgaaccctgagaaagttgcggacaacttgaaaaagcaaggtgggtatattcctagtaaacgtcctggtcgggaaacacaagcttatcttacatcggtactttatcgattaacatttgttggtgcaattttcctttcagcggttgctatacttccaactatcggtactactgtgtttagtttaccgcagtcacttgccgttggtggtacaagcctactaattgttatcggggtagcattagatactacgaaacaactcgaaggacaacttgtaaaaaggaactatcggggatttatcaaataacacgcggttcttgttaggatttcctagcaggagctagcgcgtaataaggggcgaaacagttgaaattagtattaatgggactgcccggcgccggaaaaggcacacaagcggaacagattgttgagaaatacaacattcctcatatttccactggagatatgttccgagcagctatgaaaaataatacggaattaggaaagaaagctaaatcctttatggacaatggcgaccttgttcctgatgaagtaacaaatggtatcgttcgtgaacgtttggccgaagatgatgctaagaatggtttcttgcttgatggttttccgcgtacagtggaacaagcagaagagctagaaaatattctaagtgatttagggacagaacttgatgctgtcattaacattgaagttgataaagatgttttaatgaaacgtcttacaggtcgttggatttgtcggacttgcggtaaaacttaccatgaaatctataacccaccgaaagttcctgggaaatgtgatttagatggtggagaactttaccaacgcgaagatgacaaaaaagaaactgttgaaaatcgactaaatgtcaatatgaaacagaccaagccgcttcttgatttttactctgaaaaaggtaaacttcatagcataaacggcgagcaagatattaatgacgtttttgtagatgtggaaaaaattcttgcttctttttgaggggtaagctgtgctgaaatcactgtcaaaatcaatgcgtgcaaattggtttgatttgtagtataatggataattggcagtggaattaaaggcatctaagcaaatcatgatgaacgagagaaccgtttgaagttcatccgaatgacgtatatgttctaccctgatctgttcagccgcaatacttttgcgagtgacagttcttctggtttttacggatttcacttttacaggttgtctgcaaagctggcgaaatgtgttgccttttaatgaagtgcatccatttttgcatgttttacgtttttttcatgtaagagaaatagttacactgaaaggattaggcctgcatcaggaacaaatccaagaatacaagaaggaggtagcaaacatatggcaaaggaagatgttattgaagtagaaggcgttgtgcaagaaactctaccaaacgcgatgttcaatgttgaactcgaaaatggtcataaagtactggcaactgtttctggtaaaatccgcatgcattacattcgtattttacctggagataaagtgacagtagagctttctccatacgacctgacacgcggaagaattacttatcgttttaaataatttgcactccgaaattgaatttatataccggtctggtttatccagcttagaaattatcggtttatagagacattttctctaataaacaaggaggtatatctatatgaaagtaagaccatcagtgaaacctatgtgcgaaaaatgtaaagttattcgtcgtaaaggtaaagtaatggtaatttgtgaaaatccaaaacataaacaaaaacaaggataagaggaggtgcttaagtaaatggcacgtattgcaggtgtggacgttccacgtgaaaaacgtattgttatttccctgacttacatttatggtatcggtaaacaaacagctaaagaagttcttgctgaagctggtgtttctgaagatactcgtactcgtgatttaactgaagaagagctaggtaaaatccgtgaaatcttagaccgcattaaagttgaaggtgaccttcgtcgtgaagtaaacttaaacattaaacgtctaatcgaaatcggttcttaccgtggcatgcgtcaccgtcgtggacttccagttcgcggacaaaatacaaaaaataatgcccgtactcgtaaaggcccgtccaaaacagtagcaggtaaaaagaaataatagtaaaggaggtagttagtgaatggctcgtaaaacaaatactcgtaaacgtcgtgtgaaaaagaatatcgaatctggtattgcacacattcgttctacatttaataatacgatcgtaatgattactgacacacatggtaatgctttagcttggtcaagtgcaggttctctaggatttaaaggttctcgtaaatctactcctttcgcagcgcaaatggcagctgaaagtgcagcaaaatcagcacaagaacatggtttaaaaacattagaagtaactgttaaaggtcctggttcaggtcgtgaagcggctatccgtgcactacaagcagctggtcttgaagtaacagctattaaagatgtaactccagttccacataacggatgtcgtcctccaaaacgtcgtcgcgtataagtggtcgttttcttttgccaatagtagatttttactgtcttaactatcaaggcagagagtttgacataaagactgatattctagacgttttgaaggagggtaaatttgaatgatcgaaattgaaaagccaaaaatcgagacgattgagatcagcgatgatgccaagtatggaaagtttgttgtagagccacttgagcgtggatatggtacaactttgggtaactccttacgtcgtattctattatcttctcttccaggtgcagcagtaacctctatccaaattgatggagctttacatgagttttctgtaattgaaggtgtagtagaagatgtaacaaccatgattttaaatattaaaaaacttgcgctaaaaatctattctgatgaagaaaaaacattagaaatcgatatgcaaggtcctggtgtagtaactgcagctgacattaattatgacagcgacgttgagattttaaatcccgacttacacattgctacattaagtgataatgctaaatttcatgtgcgtttaaatgcgactcgtggtcgtggttacacacctgctgatcaaaataaacgcgaaaatatgccaattggtgtacttccagtcgattcaatcttttcaccggttatccgtgtgaactatcaagtggaaaatacacgtgttggacaatcaactaattatgataagcttacgtttgatgtgttaactgacggaagtatcagcccagaagaagcagtttcacttggagctaaaattctttctgagcacttaagtatcttcgttaatttaacagatgaagcacaaaaagctgaaattatgattgaaaaagaagaaagccataaagagaaagtgcttgaaatgactattgaagaattagacttgtctgttcgttcatataattgtttgaaacgcgctggaatcaacacagtacaggaacttgctgacaaatccgaagacgatatgatgaaagtccgtaacttgggccgtaaatcgcttgaggaagttaaagtaaaactggctgaccttggcttatctctaagaaacgaaaactgataaaggaggcaattccatgggttacagaaaattaggtcgtacaagctcacaacgtaaagcgttactacgtgatcttgcaacggatttaatcgtacatgaacgtattgaaacaacagaagctcgcgctaaagagattcgtaaagttgttgaaaaactaatcacttctgggaaaaaaggagacttgcacgctcgtcgtcaagcagctgctttcatccgtcatgaagttgtagaagtagtacaagtagatgctaaaggtaaagatggttctactgtgaagaaaaaccgtcctgtatacgctctacaaaaactatttgatgatgttgctccacgttacgcggaacgtcaaggtggttacactcgtatcttgaaaaaaggtccacgtcgcggtgacggcgcaccaatggttattattgaattagtttaataataaaacgtttaaagcaagtggagtgtcatgatatggagacttcgtgtttccttgtctagctctgtgtttcctagtctatttaatcgtaggctagggggcaggctttttttgtttgacctgctttacggacatgcttcgtgtgtgggtcaaacttgaaaagctatattttttcacttgccttttattctgaaagcatctatagtaaacctcaaagatttgtttcgagggggaactaggtatgcaatcagtcactaactcgcaaatagctcaaaatcggttatacaattcaggtctattacaaaataaattttctagcgcaccggatgcttctcgtgcgttatttggcattcaatcacagtatcaacagtttggtgaaatcagtttgtttaatcgggtgcctgatctcacaaaagaaaaacttcaacatgattacgatcaaaaagatttaattaaaatatggggtcaaaggatgactgtgcatatgtatacgccttctgactggttttttgtgcatgatgtttattcggataagaataattggttaaaaaagcacgctgactctctagggcatgatttagacttactgctggaggatatggagcaacttcttttaagcgaagagaaaataccgaaagaagcatttgctgaattattaggacagcacgctaaagaacttatgctatggggtggtgtttttattcaaggatcgcttgatggcacgctcttttgtgtaccggaatcacctaaaacaagattttatagccatagaaattggattagtgcagaaaaacaaactaattggctagaaacgggtcgtaatgaaggtggacttgaggtaatgattgaccgttactttagcgcgtacggtccagctacaattcgggatttcaaacattggacaggcctgcggaagtttgaattccaacaaacacttgaggcggctcttgaaaattattttagttacttaggtgaggatggtcaggtttactatagcaaaacagaaattcaaactgacttagaacaacaacggccacttttattaggaaaattcgatccactttttgttagctacgggaaaaaagactggttagctgatgcaactgaaacaagtttaatttggcgtccagctgggcaaattgaggctgttctaattataaatggcttattttacgggacttggagatataagataacaggggataacgtaacgttcaccttttttcttactaaaaaaatgacgaagaaaaaccaaaaatttgttgaaacggaagcgagaaaattagcgaaatttcttcataaaaaataccaaggaagtttttttgaacaaatttaaaagaagcccgttcgcaaaagctatcgcgaacgggcttctttttataggaaaggcatctctgggaagctacttaatggaagcttgatacttgttgtgacgtttgctttattcagcctgcaaacttcaaaatcagcttgtaaagataataaaaatattgcatcttctagtgttattttatctgattccattagtacgtttaacatgttttgtaatgctttttttgttgctttttcggtagtgagttcagagccgaggcagattaggttgtttttatgaataataatcggtgttggggctgttttgtttttgagtaattgtagccgtaatgttacttctgcagggacttccgcgctggttgatgttgtttttccgaaacctgtagttgctcttatatcagctacatggagcattgccccgaatttttctactggtaaaaatattgtagcgccttctgttatatcgggagagtcaagtgtcccgccgtgtttagtaggcatatgaaatggttttgtttgatgaatggattcggtttttaatagaccaattgttttttgtaattgtacgtggatttcatcggaataaataatcttattctgtttgattttatagcggcggatacaattatttggtagtaaatcatctgttacaccgatagtaggtccatttaataaaacgacatctttacttgtgagggtgattttttcaatggttactgcgagtaagtcccctgggcgcgcttcttcaatacagattgggcctgtggtgggcgaaaactgcttccaatctatttccccgtagtgaagctgttctttgttgatttggccattgaagtgatcttttatttttattgtcacaacggagccatctttgactgtaagcacaggttttgctgattcatccatcttatgaatcgaacgttctgaagttacaaagtttttcatctcatcccttctctctattctgttagtgttgacgggtgaattatagcaaaacgagaagatgtaagtaaatggatattctgtgaacaaattaattaaaatgtgctataaatatctaatttattccattttttcaatcgtgacatcgggaagcgtttgaataaagtgaaatagttcatattcgtcgttcttattcttggtttttacaacgatattgacccggataaatagactttttccgaccaattctttttcactagagtacgaaattatttgttgtttattttgctggattttgtcagtgatttttactaaattttcttgtttatcagtggaataaataagtgacgttgtatggagcgaaacggatttaaagacgatactaagaaattctaagccaatgagtgtgagtaatgtcgcggcaattccaacccaatacataccagcaccaacagcgagaccaatccctgctgtagcccaaagtcctgcagctgtcgttagtccacgaacaaatttcttttgaataataatcgtaccagcgccaataaagccaataccacttaccacttgggcagcgacacgactagggtcaaatgatacagtttgcatagtggcgatttcggaaaaaccgtactgagaaacaatcataattaaagcactaccaagtgaaacgagaaaatgtgtccggaaaccggcttcttttgcccgaatttctcggtcaagtccaataactgctccaaggagaccagcaacaacaaggcgtaaaataaaatctgctaacatagctatcacatccttaacgttaatatattccccttagctaaaaagcaaaacaatcaaaaaggaaattttgcgccagatggatgtttatactataataaacaatgaatggtcaaaaagtgaggtgttaagcgtggcagaaagttttgtgagattagagcacgttttttataaatatgaggatacggaaaaatatgcagtcaaagatgtatcaatttctgctcaaaaaggggaatgggtcgcgctagttggtcataatggttcaggtaaatccactattgcgaaattactaaacggcttactttttccggaagatggcttaattaaaatcggacactttgttttgtctgaaaaaaatatatgggaaattagacgacaagtgggaatggtttttcaaaatccagataaccaatttgtcggtgcaactgtacaggatgatgttgcgtttgggctagagaatcacggagtcccacatgatacgatggtggagcgagtggaatcggcgcttaatgaggttggtatgcaaagctacgcgctacatgaacccgctagactttctggtggtcaaaagcaacgtgtcgctattgcgggtgttttagcgcttcaaccagatgtgattattttggacgaagcaacttccatgcttgatccaagagggcgcgccgaagtaatggagactattcggattatgcgagaacaagaggatattaccgttatttctattacgcatgatttggatgaagtgctttttgcggaccgggtcattgttatgaataatggagaaatacacagtgaaggcacgccaaaagaaattttcgagcaagcagatgcaatgcgagcaattggcttaggcgttccatttattattgaattacaagaaaaattagttgcaggtggctttgaaacagggagtaccgtgctatcggaaggagcattactagatcaattatggaaattaaactcgaacaactaggttattgttatcaaaaaaatagcccttttgaaaagagagcattgcttgatgtaaatgtttcctttgattctggtagctattctgcaattattggtcatactggctctgggaaatcaacattgctacaacatcttaacgcgcttttgatgccaactgaaggtaaaatcacggttggcgatagagaaattgtcgcgggagttaaacaaaagaaactacgcgatttacgcaaaaaagttgggattgttttccaattcccggaagcacaactttttgaagaaacggtggagaaggatatttgctttggtccaatgaattttggcgtttctgaggaagatgcgaaacttcgggctaaaaaagtaatttatgaagtagggctgacagaagaaattttatctcgttcgccgtttgaactttctggtggacaaatgcgccgggtagcaattgctggagttttagcgatggatccagaggtacttgtgttagatgagccaactgcaggactagaccctcatggccgcgaagaaattatggagatgttctataaccttcataaagaaaaaggactaacgacagtccttgtcacacatagtatggaagatgctgcacgttacgctgaaaagattgttttaatgaaagctggaacggttctgaaaattggatcgccgcgagaaatttttgcgaagccagatgaacttgtggaccttggcttatctgttccggatgtggtgagattccaagggctttttgagcgcaagtttaatgttaaattaacgaaaacttgtttaacaattgctgaattaacagctgaaatggcgccttacttagcgaagggcggggcttaattatgatggaaaaaatgattctcgggcgttatatcccgggaaactcttggttacatcgaattgacccacgcgcgaaaatcactgctgttatggcgtttatcgcgattgtttttttagcgaacaattggctgacctatgcgcttatgtttgcgtatgttttgtatttagtcctaacctcgaaagtgccatttttattttttattaaagggttacaaccgattttttggcttattttaattactttattgctgcaagtcttttttacaaaaggcgggacagttttagttgatttaggacttttacaaataacaaccctcggactggcgaacggggcgatgatgttttgtcgttttgttctcattatatttatgacaacgctactaacattaacaacaagcccgattgagctgacagatggtcttgagaaaattttggcgccgtttcgattggtgcatttaccagtgcatgaactggctttaatgcttagtatttccttacgatttattccaacattgatggatgaaacggagaaaattttgaaagcgcaaaaagctcgtggcgttgaatttacgagtggaaaatggagtgaccggatcaaggcgattattccgctactcgtgccactttttattagtgcgtttaaacgtgcggaagatttagcgattgcaatggaagctcgtggttatcgtggtggtaaagggagaacgagatttcgcttgttacgctggcgattcgcggacacatgcttgttaatttctttagcggtgttaagtggattattattttggttgcggagttgaaatggatgacacgatataaagcaataatttcttatgacggaagtggttttttcggataccaagtgcagccgaatacacggacggttcaagcagaaattgaaaaagcgcttgaaaaaatgcataaaggtaagagcgttcggattacagcttcaggaagaacagataccggcgttcatgcgaaaggacaggtaatccattttgattcggaactggatattacagcagaaaaattccaaaaagctttgcaagtgatgacgccgtttgatattagttttttaacggttgaggaagccccggctgattttcacgctagatttggcacggttggaaaagaatatcgttatgttataaaacggacgaaaatttttgatccttttagtcgaaactttgcgctacattatccatatgaattagatattgcaaaaatgaagcaagcaagcgaacgcctaattggcgaacatgactttactagtttttgttcggctagaacggagcgggattctaaagtgcggacgctttatagtatcgacttttatgaagaggatgccgagacattagtgattgcgtttcaagggaatggctttttgtataatatggtgcggattttgacagggactttgcttgatgcaggtcaaggtcggatttctccagatgatattacgaaggccttattagcgcatgatcgccaaaaattaattagtaaaactgcgccgccacaagggttgtatttatggcgagttgattatgaataaaaattggatgtttttttacagaacgcattgacttttcactctaaaaactgtattatggactatggtattgtttgccccacaataagccccggaaggttgttgtgtttaaacaataaaaatatagaatagcatttcgggaattaggaacagttttcgggagctaatttgtttcaatttatttaggagggtaattcatgcgtacaacttatatggcgaaacccggcgaagtagaacgtaaatggtacgttatcgacgctactggtgtttctttaggacgtttatccagtgaagttgcttcaattcttcgcggaaaaaacaaaccacaatttactccacatatcgacactggagactttgtaatcatcatcaacgctggtaagattggtcttactggtaaaaaagctactgacaaaatttactaccgtcactctcaatatccaggcggtttgaaatctcgtactgcaggtgaaatgcgtacaaacaatcctgagaaattattagaactatctatcaaaggtatgcttccaaaaaattctcttggacgtcaattattcaaaaaattacacgtatatggtggatctgagcacgaacatgcagctcaaaaaccagaagtatacgaattacgcggttaattaataaaggaggaatactaagtggctcaagtacaatattacggaactggtcgtcgtaaaagctctgtagctcgcgtacgtttagtaccaggcgacggcaaaatcgttattaacaatagagactgggaagattacatcccatttgcagctcttcgtgaagttatcaaacaacctttagtagctacagaaactttaggtaactatgatgtactagtaaacgttcacggtggtggttacactggtcaagccggtgctatccgtcatggtgtagctcgtgcactattacaagtggctcctgagtaccgcccagcacttaaatctgctggcctacttactcgtgacccacgtatgaaagaacgtaaaaaatacggacttaaaggcgcgcgtcgtgcacctcagttctcaaaacgttaatcaaatcgtttcaaagcaccagcttttgctggtgcttttttgtttgcttaaatatatgagaaaagtaaaaaaaggaaccatgcagaaacacgattccgaaaaaatttggtttgaatgttttattgtgattattataacaaatttatcgaaatatgctataataatttaaggttcataatagttagataaatagatgaatgaagtgattactagtataaatggtatatcttaatatacatagaaataaggaattgttgcaattttgagttcttaaaaaagtgcacaaaaaaagcgccgaaacagcgctacttaattaaaagttgataacggacaaagccttattttaacttgctatgttattttgaatactaacaatatatacattgtaccaaattataaaaagaatgcaactaaaaataggttgaagggatgaagaatatgaaaaaaccgtacacgattggactagacataggaacaaactcggttggatgggcagtgttaacagatcaatatgatttagtgaagaggaaaatgaaaattgctggagactctgagaaaaaacagataaagaaaaatttctggggagttagactatttgatgagggtcaaacggcagctgatagaagaatggctagaacagctagaaggagaatagagagaagacgcaatcgtatttcgtatttacaagggatatttgcggaagaaatgtctaagactgatgcaaatttcttttgccgattaagtgatagcttttatgttgataacgaaaaaagaaatagtcgtcatcctttttttgcgactatagaggaagaagtagaataccacaaaaactacccgaccatttatcacttgagagaagaactcgttaattcttcagaaaaagctgatttaagattagtttatttagctttagctcatattataaaatatcgagggaactttttaattgagggggcattagatacccaaaatacttctgttgatggaatatataagcaatttatacaaacatataatcaagtatttgcaagtggtattgaagatggttcgctaaaaaaattggaagataataaggacgtagctaaaattctcgttgaaaaagttacgcgaaaagaaaaacttgagagaattttaaaattataccctggtgaaaaatctgccggaatgtttgctcagtttatcagcttgattgtaggcagtaaagggaattttcaaaagccttttgatcttattgagaaatcggatattgaatgtgcgaaagatagctatgaagaagatttagagtctttgttagcgctaattggagatgaatatgcggaactttttgttgcggcgaaaaatgcatatagtgctgtggtgttatctagtattatcacagtggctgaaactgaaacaaacgcgaagttatccgcaagtatgattgaacgttttgatacacatgaagaagatttaggggaattgaaagcatttatcaagcttcatcttcctaaacactatgaagaaatatttagcaataccgaaaaacatggttacgcaggttatatagacggtaaaacaaagcaagcagatttctataaatatatgaaaatgacattagagaacatcgagggtgccgattattttattgctaaaatagaaaaagaaaactttttaagaaaacaacggacgtttgataatggggctattccgcatcaattacatttagaagaattagaagccattttgcaccagcaagcaaaatattatccttttttaaaagaaaactatgataaaatcaaaagtttagtaacttttagaattccttattttgttggcccactagctaacggacagagcgaattcgcatggttaacaagaaaagctgatggtgagattagaccgtggaatatagaagagaaagtggatttcggtaagtcagcggtcgatttcattgaaaagatgaccaataaagatacatatttacctaaagaaaatgtattgcctaaacacagtctctgttatcaaaaatatttggtttataatgagttaaccaaagttagatatattaatgaccaagggaagactagctatttttctgggcaggaaaaagaacagatttttaatgacttatttaagcaaaagcgtaaagttaaaaagaaggatttagagctgttcttacgcaatatgagccatgttgaaagtccgactattgaagggttggaagactcgtttaattcaagttattctacctatcatgatttactcaaggtagggataaaacaagaaatccttgataacccagtaaatacggaaatgctagaaaatatagtcaaaattttaactgtgtttgaagataaacgtatgattaaagagcagttacagcaattttctgatgttttagatggggttgttttgaaaaaattagaacgacgacattatacaggatggggaaggttatcagctaagttattaatgggaattcgtgataagcaatctcacttaactattttagattatttgatgaatgatgatggacttaatcgtaatctgatgcaacttataaatgacagtaatttatcatttaaatcaataattgaaaaagaacaagtaactacagcagataaagatattcaaagtattgtggcagaccttgctggtagcccggctataaaaaaaggtattctacaaagcttgaaaattgtcgatgaacttgttagtgtaatgggctacccacctcaaactattgttgtggaaatggcaagagaaaatcaaacaacaggaaaagggaaaaataattctagaccacgttataaatcattagaaaaagcgattaaagaatttggtagtcaaattctaaaagagcatccgactgataatcaagaattaagaaataatagattgtatttatattatttgcaaaatggcaaggatatgtatactggacaagacctagatattcataatctttctaactatgatattgatcatattgtgccacagagttttataacagataactccattgataatcttgtgttaacgagttcagctgggaatcgggaaaaaggggatgatgttccaccactagagatcgttcgaaagagaaaagtattctgggagaagttataccaagggaatttgatgagtaaacgtaaatttgattatttaactaaagctgaacgtggtggtcttacagaagcggataaagcgagatttattcatcggcaattagtggaaactcgtcaaataacgaagaatgtagctaatattttacatcaacgttttaattatgaaaaagacgatcatgggaatactatgaagcaagttcggattgtaacattaaaatctgcactggttagccaattccgtaagcaatttcaattgtacaaggtgcgtgatgttaatgattatcaccacgcccatgatgcttacttaaatggggtagtcgcgaatacgttattaaaagtatatcctcaattagagccagaatttgtttacggagattaccatcaatttgattggtttaaagcgaataaagccacggcgaaaaaacaattctatacaaacatcatgttattctttgcgcaaaaagatcgaataatagatgaaaacggtgaaattctttgggataaaaaatatttggatactgtcaaaaaagtcatgagttatcgacaaatgaatattgttaagaaaacagaaattcaaaaaggagaattttcaaaagctacaattaagcccaaaggaaattccagtaaattaattcctagaaaaactaattgggacccgatgaaatatggtggtcttgatagccctaatatggcatatgcagtggttattgaatatgcaaaagggaaaaataaattagttttcgagaaaaaaattatccgtgttactatcatggaacgtaaagcatttgaaaaagatgagaaagcctttttagaagaacaaggttatcgtcagcctaaagtcctcgcgaaattaccgaaatatacgttatatgaatgtgaggaaggacgccggagaatgctggctagtgctaatgaagctcagaaaggaaatcagcaggtattgccaaaccacctggtaacattactacaccatgcggcaaattgtgaggtaagtgatgggaaaagccttgattatattgaaagtaatagagaaatgtttgctgaactactagcgcacgtatcagaatttgccaaaagatatacgttagctgaagctaatctaaacaaaattaatcagctttttgagcaaaataaagaaggcgacattaaggcaattgcacaatcttttgttgatttaatggcattcaatgcgatgggcgcgccggcgagttttaaattttttgaaaccactattgagcgtaaaagatataacaatctcaaagaactattaaattccactataatttaccaatcaatcacaggactatatgaatcacgaaaaaggctggatgactaaatgggatggcggacagttgttgtaaattctcattcgaaactatcgtacaaaaaccagcatcttgtttttaaatctgcctatcaacaggaaatgattcatctatcagaaattgatgtacttatattagaaacaacagatattactttgactacgatgttaattaactgcttagtagctgaaaatattttgattctcttttgtgatgataagcgattgcctattggaaaggtacttcctttttatggacgacatgacagtagtttgcaattatcgaagattcgaccatatttgcaatagaagatgtgcgtgtttttgccaatgttactaagtggttgtatcaatacgacgaaacagaagaattaacgatttttggtgcgaaacaacagcctttaaaaagtagcgaactaatgttgattacagatgtattgggacacgatattaattctctggcaactttaaaactaatttatgctgatttagaacagcaacttaatgaaaagccggaagtaaaatcaatgattgataagctgactgcgacgattagcgagttgattggttatgagcttctggagcatgaactggatttagaggaagatgaaattacagtcattgaattattcaaagctttgggtatcaagatagagacaaaaagtgataccgtttttgaaaaattaattgaaatagtacaagtctataaatacttatcaaagaaaaaattgttggtttttattaatgtatgtgcctatttaacagaagatgagttactagagctaaggcgctatgtctcgttaaaccaagtaaaagttttatttgttgaacctcgaaaaacagaaggattttcgcaggttattctagattcagattattttttacaagttgaaaaaggaatgtagagttcaaatgatctttgaaaactaaatagattttatgtgaaccataaaataagcattcaaaattgaaatcttgctatggatgaatggcgcgattacgaaatctaggagaataaaaaattctacgaggttttagagctatgttattttgaatgctaacaaaaccgtagcgctttggtaactttgcctaggatagttttagagctatgttattttgaatgctaacaaaactgcaaagtatttctttatttactgcattatgttttagagctatgttattttgaatgctaacaaaacaagcatctgtaaaatctgttaaatcgtcgagttttagagctatgttattttgaatgctaacaaaacgtcgcatataatgccatctaactcattatagttttagagctatgttattttgaatgctaacaaaactttctcaccagtcccaaactcataataaatgttttagagctatgttattttgaatgctaacaaaacaatggatagaggaacaacaagagaagcaaggttttagagctatgttattttgaatgctaacaaaacaacagtataaaagatgcagcgctcggaaaagttttagagctatgttattttgaatgctaacaaaactacagaaaggcaatcaccaaaataatacaagttttagagctatgttattttgaatgctaacaaaactagcaacgatgctgaatctctgttcatgttgttttagagctatgttattttgaatgctaacaaaacacaagtggaaacattagtatctatgcaatagttttagagctatgctatttcgaatactaaaaaccacatctctcaatctactccagctagaaagagttaaaccattatgaaagagaggtcccaacacatgacacaataccactacctcgcctcaaaagcagcactgaaaactacgacacacgaaaataagacagattttgtatatcaaaacgacttagatttcctgagcttgaattttgaagaaaatattgatgagcgtacaaatgaaaaattttcctactccaaatattttaacccaacctgcaatttccaagtcgctataagtgaagggaaattgccgttaaaaggtgaagagcaaaataatgattatgaatctaaaagtttaaaaatactacacgattacattaaaaaagctagtaaagaaagtgatacccttgaactatacacttcatggaacggcgaagaaaatttccctctgacgaataaaacagaattagctatagaaaatttaacgccagaaaatttgattttaagagacagagaactattaataattaaaaataagacatttacatacaccacttaaaataaaaaggagaaacctcatgaaaaaaacctcaatcatttttattttatgtataaccttactactgacagcatgttccaccaccgaaaaacaaacaaaaatagaatatacagaagcaacaggtataatagagcaagtagaaacaaatgcaattttaattaacaatttcaaagagaaaaatgataaggataatccagaatccgtcatacgctttggcatcgtagacaaatattacgacaaaaacggaaacaaaataaaactaaccgaactaaacaaaaacgacaatgtcaaaattattttaaccaaggattacccaatccaagaaacctcaccgggacaaatagaccccaaatacattcaaaaaatcatcttgctaaacaaataaaactctctcacccgcagagagttttttctttcctcaaaaaaataaacctataacccttgccttggtgtgaactccagggtttataattcaatatgtaaagacgaagtgaggtgatcgatgatgaatatcaaacaagcggccgaaatgtttgggcttacggtcgatacattgcgttactatgagcgagttggggttattccgcctgtccatcgtaatgaaagtggctacagggactataagacaagcgacttgaactgggtttatcttgtgaagagtttgcggaatgcggggttgtcagtggaatctttaattgagtttgcgacacttgcccaactaagagaaacagagaatgtcgaagctgctcaaaaacaagttttaattgaccaactaaaagaattagacgaaaaactagctgagatgaaacaagttagagatttacttgtatacaaaatcgatacgtacgatagtcacattgcccagtttaaaacaggggaactaactgcagataacgtagaaaaattatgggaacgggacaaattttaaagataagaggaggattttaaaatgaaaacagtgaaattaaataatggtatagaagtacctattcttggttttggaacgtaccaaattaccgatgctggtgaagcggaacaagcagtcaaagaggcgattgctgctgggtatcgtcatattgatactgcgcaaagttatatgaatgaagaagcggtaggacgcgggatagccgcatctggtgtggatcgcaaagagttatttatcacaacaaagatttgggtggaaaatgttagttataaaggagtcatgagttcgtttgatcgctcattaaaacgtcttgggctagactatattgacttattactaattcaccaaccatataatgatgtgtacggcgcttggatggcgatggaagaattacaagctcaaggtaaaattaaagctattggtgtatcgaattttggtgtagaccgagtagttgacttagctgccttcaatgatataacacctcaagttaatcaaatcgaaatcaaccctttccaacaacaatcaaagaatattgaagctttacgaaaagaaggcgtggctgttgaagcatgggcgccgtttgcggaagggaaaaatgatattttcaccaatccgattttgactaaaattgccgaaaaatacgggaaatcagtagcacaagttattttacgttggttaatagaacaggatattattgttttagctaagtctgtaaaacctgaacgaatggcgcaaaatttagctgtatttgattttgaactgtccgaagaagataagagtgcgattgcgacccttaatcaaggcgaaagtcaatttttctctcacgcagatccagaaatggttaaatggatggcgagtcgcaaaataaatatttaatacaagaaaagagacccgagcatttatctgggtctctttgttattaactttgaatatctgttgctttaatccaaccgagggagttattattttctttaatatgcacccactgttcgtcttgaatcgtcgcttctttatctactatcagcaatttaccataatagaaaccgactgcttttgtttcagcgctcgttgcttcgactggtttgttgtaaagcattgctgcgggattttttaaataggagacttgagttattggtttttcagcttcaggagtataaatgatatttacatctttttcactaacccaaccaactacttcgccgtctattttaaattcgtaccatagcgtgtttccgactttggcgcgtgtaactaattctagtttttgagtgtcatagtcactaagtggggcaagtttctccgcattttttgtattaaaaggggcgctccagacattatctgttgccgacttacttacagtcgcgtagccatcaaagctattttgttccgtgatacgatcatataagcggtcgttcaatttgtctgagcgaacccagccgattactttactactttctgaaagacggaaccatgcataaccatcacgtgttattttcttatcagcgtgaagtgcttttcggtcatattttgcaatcgtaccattgtcaaactgctgttccggattaggtaagcgataaatatgagcatttaagtcatctacatattttgttgtatcaacattttcgtcgttattttgatgataactcaaagtaagcgccgagctatttacccaaccaatgtctttattgttttcacgtaaaaaataccacaaacctttttctgttttcgcttcccaagaaatttctaaattgcgatttgtatagttcgctaatgtgccgacttcctcagaattagtagtattaaatggtgcagaccaaatcgtttcttgttctttatttgcattgactgtacctatagcagcgattttattttggtattcaattttatcataaacaacatcgtattgatccagattataacgttcaataatagcgactaatttagaaacataatcgggtgcggtagcgtaaccgccatcttttatcgcttgcaaggctttacgataatcagtttcacctacagcaccttgatagcgtgcattttgcgtaattaagtttgtatggtcttcaattgattctttccagctaggataaacgcggaaatcagccgtagttgccccggaagcttccatcgtccccatagaaatagatttaccttcatactgacctttaattccaaataagttattagaattcttgcttaaaccacttttaccccagttagattctaaaatagcttgggcaagtgttacactagtcaacagtttgccatctcggtaaccgtcttctgcagcgggtaaaatctcatcgataaatgcttgttgcgaagaagttaatgaattttgagcaactcttgaatttcccgtttctgctccaacatttaaagaaactactaaaaatgccacaatgagcaagataatccctggttttataaactttctctccaaaatcgaacgcactcctttttactatatctgcgcttattttagcaataaataaagaaatagttctattacagttcgatgacgaaacaaagacaaaatgctgaagtgactggtatatatagctttaacgtcaatttccaaaatgtgtaaaatttgtgaaattatttatagagtgaagcacataaatattgaatatgtgaaaaaaagaaggagccatgctataatattcagtatgtcagcgcattcatttatggaggtttgtaactatgttaaacgaacaacaaattactagattattatatcgactgcaagatcctgttttggaagctagtttggaagaaacagaaggtattttagaagtgcaggtccttggagaaagcgcaaatattaaaattgccttagcggatccagcgatagaaacagatcattttgttcataatatagaagaacttctaacgcaattcggtgtaaatgaaatcaatattgaacttgaatacttgccggctgcagtaattgaccgcatttttcaagcaagagataacatcctttcagaaactagccaaactaaatttttagcaatagcaagtggcaagggaggcgttggaaaatcgactgtcgcagcaaacctagcgatagccctagctcaacagggtaaaaaagtaggcttacttgatgcggatatatatggtttcagtatcccagtattactaggaacaacagaatccccgcgtaaagaaaatggacaaattatccctgtagaaacaaacggtatccaaatgatctcgatggatttctttgtagagtctggcgaaccagttatttggcgtggcccgatgctaggaaaaatgataaagatgtttttagaagaagtgagatggggaaaattagattacttgctaattgacttgccacctggaactggggatgtcgctctagatattcacaccttaattccaaaatgcaatgaaattatcgttacaacgccacatttcgcagcggcatcagttgcatcacgtgcgggatatatggcttcgaaaaataaccataacattattggtgtaattgaaaatatgtcctacctaaaacttgaagatggacaaaccttaaaaatatttggacaaggtggcggagaaaaagttgctgctgacctagaaacacaacttttaattcaattaccaatcgaacaaccagatttcaatggaaatggctatacatcagctatctatagcgagtctagtgaagcgggaaaagcctataaaactctagcagagaaaataattccatatttattataaaaactttgtaaaaagtattgacgaaaggcaaaaatcttggtatatttataaacgttgctgatacggacaaacgctttagcagcaaaagaaactgacctttgaaaactgaacaaaaaagaagacgaaaagcaatgagacgcaaagtctcactggtaatcgcagggcagaaaacagaaagctgttttcaacaaaaacaaactagtaatttaattgctagcgaagtcaatttgacgcaaggaatcttattcacggtgttgaataagtattcaaattcaatttatattttaaagagagtttgatcctggctcaggacgaacgctggcggcgtgcctaatacatgcaagtcgaacgaacggaggaagagcttgctcttccaaagttagtggcggacgggtgagtaacacgtgggcaacctgcctgtaagttggggataactccgggaaaccggggctaataccgaatgatagagtgtggcgcatgccacgctcttgaaagatggtttcggctatcgcttacagatgggcccgcggtgcattagctagttggtagggtaatggcctaccaaggcaacgatgcatagccgacctgagagggtgatcggccacactgggactgagacacggcccagactcctacgggaggcagcagtagggaatcttccgcaatggacgaaagtctgacggagcaacgccgcgtgtatgaagaaggttttcggatcgtaaagtactgttgttagagaagaacaaggataagagtaactgcttgtcccttgacggtatctaaccagaaagccacggctaactacgtgccagcagccgcggtaatacgtaggtggcaagcgttgtccggatttattgggcgtaaagcgcgcgcaggcggtcttttaagtctgatgtgaaagcccccggcttaaccggggagggtcattggaaactggaagactggagtgcagaagaggagagtggaattccacgtgtagcggtgaaatgcgtagatatgtggaggaacaccagtggcgaaggcgactctctggtctgtaactgacgctgaggcgcgaaagcgtggggagcaaacaggattagataccctggtagtccacgccgtaaacgatgagtgctaagtgttagggggtttccgccccttagtgctgcagctaacgcattaagcactccgcctggggagtacgaccgcaaggttgaaactcaaaggaattgacgggggcccgcacaagcggtggagcatgtggtttaattcgaagcaacgcgaagaaccttaccaggtcttgacatcctttgaccactctggagacagagctttcccttcggggacaaagtgacaggtggtgcatggttgtcgtcagctcgtgtcgtgagatgttgggttaagtcccgcaacgagcgcaacccttgattttagttgccagcatttagttgggcactctaaagtgactgccggtgcaagccggaggaaggtggggatgacgtcaaatcatcatgccccttatgacctgggctacacacgtgctacaatggatggtacaaagggtcgcgaagccgcgaggtggagccaatcccataaaaccattctcagttcggattgtaggctgcaactcgcctacatgaagccggaatcgctagtaatcgtggatcagcatgccacggtgaatacgttcccgggccttgtacacaccgcccgtcacaccacgagagtttgtaacacccgaagtcggtagggtaacctttatggagccagccgccgaaggtgggacagataattggggtgaagtcgtaacaaggtagccgtatcggaaggtgcggctggatcacctcctttctaaggaaaaggaaacctgtgagttttcgttcttctctatttgttcagttttgagaggtcactctcttgtatgtcagataaagtacgcaaggcaacatgcatggagcatagcgccactacatttttgacgggcctatagctcagctggttagagcgcacgcctgataagcgtgaggtcgatggttcgagtccatttaggcccactttttctttctgacacgaagaaaacatccaatttaattccttttaggggccttagctcagctgggagagcgcctgctttgcacgcaggaggtcagcggttcgatcccgctaggctccaccaaaattgttctttgaaaactagataagaaagttagtaaagttagcatagataatttattatttatgacacaagtaaccgagaatcatctgaaagtgaatctttcatctgataggaagtatcatcgctgatacggaacatcagaaaaacaacctttacttcgtagaagtaaattggttaagttagaaagggcgcacggtggatgccttggcactaggagccgaagaaggacgggactaacaccgatatgctttggggagctgtacgtaagcgttgatccagagatttccgaatgggggaacccactatctttagtcggatagtatccttacgtgaatacatagcgtgaggaaggcagacccagggaactgaaacatctaagtacctggaggaagagaaagaaaaatcgatttcctgagtagcggcgagcgaaacggaaagagcccaaaccaagaagcttgcttcttggggttgtaggacactctatacggagttacaaaagaaagttataaatgaagcggtctggaaaggcccgccaaagacggtaacagcccggtagttgaaatggctttccctccagagtggatcctgagtacggcggaacacgtgaaattccgtcggaatccgggaggaccatctcccaaggctaaatactccctagtgaccgatagtgaaccagtaccgtgagggaaaggtgaaaagcaccccggaaggggagtgaaacagttcctgaaaccgtgtgcctacaagtagttagagcccgttaatgggtgatagcgtgccttttgtagaatgaaccggcgagttacgatttgttgcaaggttaagcggaaaaagcggagccgtagcgaaagcgagtctgaatagggcgcataagtaacaggtcgtagacccgaaaccaggtgatctacccatgtccaggatgaaggtaaggtaatacttactggaggtccgaacccacgcacgttgaaaagtgcggggatgaggtgtgggtagcggagaaattccaatcgaacttggagatagctggttctctccgaaatagctttagggctagcctcgaggtaaagagtcatggaggtagagcactgtttggactaggggcccttctcgggttaccgaattcagataaactccgaatgccatgtacttatactcgggagtcagactgcgagtgataagatccgtagtcgaaagggaaacagcccagaccaccagttaaggtccccaaatatatgttaagtggaaaaggatgtggggttgcttagacaaccaggatgttggcttagaagcagccaccattgaaagagtgcgtaatagctcactggtcgagtgaccccgcgccgaaaatgtaccggggctaaacatattaccgaaactgtggatgaacctcttcggaggttcgtggtaggagagcgttctaagggcggtgaagtcagaccggaaggactggtggagcgcttagaagtgagaatgccggtatgagtagcgaaagaagggtgagaatcccttccaccgaatatctaaggtttcctgaggaaggctcgtccgctcagggttagtcgggacctaagccgaggccgataggcgtaggcgatggacaacaggtagagattcctgtaccagtgctaattgtttaaccgatggggtgacacagaaggatagggaatcgcacgaatggaaatgtgcgtccaagcagtgagtgtgagaagtaggcaaatccgcttcttgcgaagcatgagctgtgatggggaaggaaattaagtacggaagttcctgatttcacgctgtcaagaaaagcctctaggaagagtagtactgcccgtaccgcaaaccgacacaggtagatgaggagagaatcctaaggtgagcgagagaactctcgttaaggaactcggcaaaatgaccccgtaacttcgggagaaggggtgctctattagggtgcaagcccgagagagccgcagtgaataggcccaggcgactgtttagcaaaaacacaggtctctgcaaaaccgtaaggtgacgtataggggctgacgcctgcccggtgctggaaggttaagaggagtgcttagcttcggcgaaggtacgaattgaagccccagtaaacggcggccgtaactataacggtcctaaggtagcgaaattccttgtcgggtaagttccgacccgcacgaaaggcgcaacgatctgggcactgtctcaacgagagactcggtgaaattatagtacctgtgaagatgcaggttacccgcgacaggacggaaagaccccgtggagctttactgcaacctgatatggaatgtttgtaccgcttgtacaggataggtaggagccgaagagacgtgtgcgctagcatacgaggaggcaatggtgggatactaccctggctgtatgaccattctaacccgccacgctaagcgcgtggggagacagtgtcaggtgggcagtttgactggggcggtcgcctcctaaagagtaacggaggcgcccaaaggttccctcagaatggatggaaatcattcgcagagtgtaaaggcacaagggagcttgactgcgagactgacaagtcgagcagggacgaaagtcgggcttagtgatccggtggttccgcatggaagggccatcgctcaacggataaaagctaccccggggataacaggcttatctcccccaagagtccacatcgacggggaggtttggcacctcgatgtcggctcgtcgcatcctggggctgtagtcggtcccaagggttgggctgttcgcccattaaagcggcacgcgagctgggttcagaacgtcgtgagacagttcggtccctatccgtcgcgggcgcaggaaatttgagaggagctgtccttagtacgagaggaccgggatggacacaccgctggtgtaccagttgttccgccaggagcatcgctgggtagctatgtgtggcagggataaacgctgaaagcatctaagcgtgaagcccccctcaagatgagatttcccatttcttcggaaagtaagatccctgaaagatgatcaggtagataggtttggagtggaagtgtagcgatacatggagcggacaaatactaatcgatcgaggacttaaccaaaaaatgaaacgaagttacctaactgaaccctttcttctctagttttgagagagcaatctttcaacaacttcatattgtctggtagttatggcgagaaggtcacacccgttcccatcccgaacacggtagttaagcttctctgcgccaatggtagttgggggcttccccctgcgagagtaggtcgctgccgggcaatttattattccacagtagctcagttggtagagcaatcggctgttaaccgatcggtcgcaggttcgagtcctgcctgtggagccatttttttatttgaaaggctttgctgccgctttagctcagttggtagagcacttccatggtaaggaaggggtcgtcggttcaaatccgacaagtggcttaatataatatgcttgtacttagaatgtttcgctagtatgcgaggctttttttatttgtctaaaaataataaactccttatcagaagtatacatatgcattattattcaatgtgtttttatgaaaaatgttaagtaattaaataagtatcgaattttcttggatttattattattatattgagaaaaatgtgtatttttagacataattaaaagattggttgtataaaatatgaataacaagctaatacgtgtaggattttaacaatgaaacaattataaaagtcaatttgtgtggaaataaaacaaaattttctttactttttagtagtcggttacaagaaacagccattttctttcgttttcggtcatacatcgtattattatgataccttatatatgtgtaagaaaattttaaaaaggagataacatcatgagaaaaaaaactgcggtaacaattttgctttttattgtactattgacaacgattctaatgccaacgaatgcaaatgcctatactaaattaggttattctttaagtaaatcaaatgctaagaattttaaattttatattaatgggtcggcgatgggttataaaaatataattattaatggagcaaaatcttggaatgcttctccatatttaaatacggtaagtaagggacgagatgcaaaccctcactttataattagtagttcaactatagacagaggggcaactgttgctgtctgcgaaacttgggcatataaagggtctaagttagtagccaaaaatgaaataactacttttaaagcttttagatctttatctgtaggtgataagactgaaactatagctcacgaatttggccatggccttggtttaggacatgtgaaaacgaagaatgcaatcatgctagatgttggttttacaaagaaaataaaaccacaaagggatgatttaaacggtattaaagcaatatataaataaaaaggaggattgaaaaatgaagaaaagtattatcgttatcataggattagtgagcatagttggattgacgggttgtactaataataaaaatataaatgaaaaacaaatagtaggaaaagaaatcgaaaaagttgaacaaaaaagtagtatagtttcttgtgatggaaagtatctggatcttgcagaaaatattgaagaactagaagaaagttctcctattattgttactgtaacgaaacgctctgaaaaaaaatctattacaaaagaatcaaaaaatagcaatgtgcctacagaattttatactatgagtgaagtagttataaataatatagaaaaagatgaaacgaagaccttagaagaaaataaaacgattaaggtattagaagatagtgttgaaaatgttaaaatcgatggacaagaatacgatttaacgattgatgggtataaaaatatgaaagaagacgaagaatatacgctatttataaggaaaagtacatctggagataattatgtacttacaaatgctatgttaagtaaatatcctgttgctgagttgagtgaaagtgagctgttccttgaaaatgaggaaaacaaggaagaagcgatagatatgaaagatacgtataaggatatatataaggaagttctaagtgattataactaaaaaaatatgtatcttatgaccctgggaataaaactggggtctatttttatggaggctttattacatgtcttgaataggtcgtataaatagattatactaggggtataaatacaaggacggatggggtgtttttttgaaggagaagaagcagcggattattaagtcagctaaagaggtgtttcaaaagcaagggtacttgaagacttctgtacaagatatggtggatgcggctgggatttctaaggggactttctataattattttacttcgaaagaggagctggccattgtcatctttaagcaggagtattctgtattgcatcagcgtttggaatatacgatggcgctagatgggacgaagaagaataatttcacggaatgcttgaaaattattattcatttttatacggaaaatggggagatattgaatattactttttcgcagacgatgattgatgatgactttaatgcgttcttgcagaatgttcgacttaagaatatggaatgggttaaaaatcagcttttagaggtttatggaaaggaaacggagccttatattaacgatattacgatgctcttgagtgggatggcggcgatgtatgtctttgcgagcggtagtaaaaatgttgactctggtttaattgaaagagctattccgtatgttgtgagaaggctagatgcgcttgttaaagatatattggaaagcggagaaattatttttactgaggctgatacagagaatttggtgccagatcaaacgatgatccgtaagaagcgtcttgctaagttacgagaagcgcttgaggagcttaatgtaggaattgagaatgcggatattgctgattcggataagtggcagtataaagaatcgatgaatgcacttgttggcgagattaataataatgaagcgccgagagatttcatggttcaaggcacgcttttatatcttaaacagcatgtaccggctactttaaccaaagaagtgaataaattagaagcgtgcgtgaacgggcttttataaattttagactaactagtcactttttattgacttgttggtctttttttattatacttctattattcatctggaaatttccacatgggaaggggtattaattttgaatagtacagcagtagaacggcccgttgatgttaatgggaaatcttatagtagaagtttattagtagtaacaatgattattggggcatttgtagcgattttaaatcagacgttactagcaacggcgcttccaatgattatggatgatttgcatattacagcagcaacagggcaatggttaacaacagctttcttgctgacaaatgggattatgattccgattacagcacttttaattgaaaaaattagttcaaaaacgttatttattacggcgatgactgtatttacaattggtacaattatttcgtctgtggcgggttcattcccgattttacttactggtcgtattgttcaagcggctggtgcgggtattatgatgcctttacttcaaacgatattcttgctgattttccctcgtgaaaaacgtggggcagcgatggggctgatgggacttgttattgcgtttgctccagcgattggtccaacgttatcaggttggattgtggattcatatgattggagagtattatttattattttaattccaattgcggttattgatattattttagccttttttggaatgaaaaaagtagtgaagttaactgatacaaaaattgattntctttccatcgtgatgtcttctattggttttggggcattgctttacggatttagttcagctggtaatgatggctggggagacgcgactgttattacgacattaatcattggggcggtggtatagcgttatttgtatggcgccaacttgttattgaaaatccaatgcttgaactgcatgtgttaaaatatccagtattttcattgtctgttattcttnggtcaattgtacgatggccaatgattggtgcgnagattgtattaccactttatattcaaccgattcgcggggagtctgcgcttcaatctgggctactattactcccaggtgcgattattatgggtataatgagtccaatcacagggattatttttgataaaattgagcgaaatggttaacgattaccggggttcaaattttgactatcggtacgataccatttatgtttttaacaatggatacgccgctttggtatattgttgtgttttatgccgtgagattcttcgggatttcgatggcgatgatgccagtttcgactgcggggatgaatgcacttcctaaccacttaattaaccatggttcagcggtaaataatacaattcgtcaaattgctggttcgattgggactgcggtactgatcactgtgctaacgaatgtgacgaaagataatatgcctggtaaagcgcttatggcgactgatccagctagttttgctcaaaaagcacaagatgctagtctggacggaatgcgtgcggcgtttatggttgcagcaatctttgcggctttaggcatgatcttaagtttattccttaaaaataaaaaacaagagccaatcgtcaaagaatacaccaaataatatcgaaacagggtcaaacatccaatttggataaatgaccctgtttttttatacttttttaagagaaactttccagctggtgcctgttcctaccgaatatgcgtctacgaaagaaccttgattgatgccgagcccaagattatcaagtgagtttacatagatgagtgcttcaccaatgcgtaagtctgcgaatgagcggctgtaggtaacgaaatttttataaactacgcggtcgtggtgtttgattagaacttcgatggaatcgccgtattttgcgccaagttgcaggaaatcagtccgacgaatatttgtccaaaggttgccaaatgggcggtcgattatatcaattgttccataagcctgttcatcttctaaataagagtcacttaggcttaacgaaacaatggattcaggtgtggcttcaggaccaatatcttcaaaactaatcacaccagcagcaagtcttgccgcagtataggcaaaaatatctctaccgtggaatgtatgagaagcacctgaccttggaaggcgatttttctcttcatcaatcagacgaaccgctttaatcgttccgtaatgggcaatatgtgttaaagttccgttgtctggtgtaataatataatgaccatcctctgttaaaacaactacactgcgacgttttgaaccaacacctgggtcgacaatagatacaaaaatcgtagcttcaggccagtaaggaacagtttgtaaaagacgataagaagcttcccaaatattaaattgaggaatttgatgcgttaaatcgtatatttgtaaatcgctactaacactattaatcacaccatacatagcactaactgcaccatcactaataccaaaatcagattgtaaaacaagtagctgttttgtcattttaaactcctccatttcgggcaatttagggtaaaataaaaactcgccctcgtccaagaaactcttggaataagggcgagaaaaatttcacgcggtaccaccttaatttattttcagctcacactgaaaacctcaaataagcattttatgtaaaatacttagggcgtttgataacggacgccaaatccgttgtggcttacttattttcagcgacaaagctcagaggccattttcggacattgttttttgttccttttcagcagtgggaactctctttttgaaaaaacggatgtcgtacttttctcgtcatagctttgttataaagaatacagaaaagttggataagtgtcaatgaatatagcatgatttgtgagggaaatcgcatagtagtgctatttgagaacgattatcaactgtctttttactgtgatttttaagtaagaactgttataatataagcgaaaattgtaaacgctttctctatttaggaggtaatgtgatgggcgcaaaagtatcagtgcgaattaatggtgaggcgcgggatgtggtggaaggaacgcgaatactggactatttaaatgcagaaggaatacagcatccgcatatttgttatagtgagcaaatcggtcctattcaatcttgtgacacgtgtatgtgtgaggttgacggggagcttatgcgggcgtgcagcacgaatcttacagatgggatggaaattaaaacaaattcagaactagctaaagatgctcagttagaagcaatggaccggattttggaaaatcatttactgtattgtacggtttgtgataataataatggcaattgcaaagtacataatacaacagaactgcttggcgtggaaaaacaagaccgcccataccgggaaaagggctacttaaatgattttacgcatccattttatcgctatgatccggatcaatgtattctttgcgggcgctgtgttgaggcttgtcaacaagttcaagtgaatgagacactttcgattgattgggaaagaagtcagccgagggttatttgggatgatgatcgtccagcgaatttatcatcttgtgtttcgtgcggactttgtgcgacagtatgcccatgtaacgctttaatggaaaaatcaatgcttggtcaagctggctttatgaccggacttgatgaagacatgctagaaccaatgattgatatggtgaaaaaagtcgagccaaattatcaaaccgtttttgcagtgtcggaaatggaagcggcaatgcgggaaacgcggacgaaaaaaacgaaaacagtttgtacattttgcggggttggttgtacgtttgaagtatggacgaaagaccgcaaaatattgaaagtcgagccaactggggaaggccctgtgaacaaatttgctacgtgtgtgaaagggaaatttggttgggattttgttaatagtgaaaaacggattacgacaccactgattcgcgaaggaaatgaatttgtgccagcgagttgggaagatgctattcacctagttgcaaccaaactacgcgaaattcaagctaaatatggaaatgattcgattggttttattagctcttctaaaacgactaacgaagaaaattatttgatgcaaaaactagcgcgccaagtgttcgaaacgaataatattgataattgttcgcgttattgtcaggcgcctgcttcggatgggcttactcgtacagttggtattggcgcggattcagggactgtagaagatattgaaagtgcgggactcgtgattattgttggcgcatctccagcagatggccatccggtacttgccagcagaattaaacgagcacaaaaaacacgcggtcaaaaactgattgtttcagatttgcggaaacacgaaatggcggagcgctcagatttatttatccatccaaaacaaggaactgactttgtttggttaacagcagtcgctaaatatattattgaccaaaattggcatgatcaggtctttatggaaaatcgaattagcaatgtggcggattatctagcatttttagaaccatttacactggaatacgcggaaaaagaaacgggattaccggctgaaacacttaaattagtggcggaaatgattcatgaagcagatgggacagcggtttgttggggaatgggagttacgcaaaacattgcgggatcgcatacatcatcagctattgctaacttgcttcttgtaactggaaactttggaagacacggtgcgggtgcttatccgcttagaggtcataataatgttcaaggcgcttgtgatatgggctcattaccaaatgttttaccaggaattcagccacttggaaatgatgaagttcgcgctcgttttgaagaagcatatggggtgtcgatttcaccagaaccaggattgaaaaataatgaaatgcttgatgcgattgaagcaggcacacttcattctatgtatgtcattggtgaggaaatggcttgggttgactctaactctaatcacgtgcaagaaatcctttcaagccttgatttctttgttgttcaagatgtatttctatcaaaaacggctcaatttgccgatgttgttttcccagctgctccatcacttgaaaaagaaggaacatttaccaatacagagcgccgtgtacaacgactttatgaagttttagagccgcttggagattctaaaccagattggtggattattcaagaagtggcaagagcatgtggaagaacagattggaattatgaccacccgagtgaaattatggacgaaattgcaagtttagcaccattttttgcaggtgttcgttatgatcggatgcaagggtttaatagccttgtgtggccagttagtgcggacgggaaggatatgccgctactttatgaagaacgatttaatttccctgatggcaaagcacagttctcgacattgccatatattgcgccgattactttcccggaagaatttaatttaacacttaataatggtcgtttactggaacaattccatgagggtaatttgacggataaatcaaaaggcttggattacaaattaccggaagtgtttgtggaagtttcacacgaattagctaaagaacgcgatattgaaagtggttcgcttgttcgtttaagttcgccgtatgggcgcatcaagcttcgggcggttgttactgagcggatgaaaggcaatgaagtctatgtaccgatgcattcagtgagtagcgaaacagcggtaaaccttttaacttcaagtgctggggacgttcggacaaaaacacccgcatataaacaaaccaaagtaaatctaactgtacttgaaaaaactgggaaaaatccacttccagatcacaatccgcggaaccgtaaaagattcccgcaaaatggggctgaggtggagcgcaagtggtcaagagaagattatcaaccgatttctaaagtgaactgcgcctgtggtggaaactgcggatgtggggggaaagggaggaatcattgatggcagaaccaatttcaacgattcgtgatacaaaaaagacaccagaagaactagagcaagaacgtttagcgcaaatgaaagctgacattgctgaacaagattctggttttatcgaaatagtagaaacggtaaaattattgcaagaatctggagcgctagaagctttaaatagcgcgattaaggcacggggggatattacgaaaacatttttaaatgaatggcgtaaagaaccaatgacaaatgcgataaataatatgatgatttcaagtaaactgctaaccgatacaaaaccagagcaaaccgaggaaatgatttcaaatttaaaggatgcagcgaaaaaagctgaagaaagtgcaaaaaacgacgaaatcatgggtatgttagcgattatgaaggcgctgaaagacccagatattaaccgcgcgctccgttacggcatgacttttttgaaagaagtagggaaaacattaaaataatcatttgaaacagcgagacttcctagtatcgctgtttcggcttagagaggagtggtttttgatggatattgtatcgcgtcaaaaggtccgccgttttgaagctggcacttttcaagaaatcgaatcaagtgttgcgaccgagtatccgctgactatctacgttaacgaccaagaactcgtgaccatcgtttgcacgcccgagcatttagaagatttagtcgtagggtttttaacttcggaaggcattgttcgtgggccgggcgacattgattctgtggatattattgaagcgactggtcatgccaaagttagcgccaactttgtgaacaaattcaatgccaaataccgcggcaaacgttatattacctcatgttgcggcaagtcgcgagaaaatttctactttcagtcagatgcctcactcgtcaacgtgaagcaaaattcaaatctgaaactcacaacagacaggattttccgcttaatggaaaaatttgagcaaaattccgcaacgtttcatcaaaccggcggggttcataatgcggcgctatgcagttcggcggaaattatttatagtcggatggacatcggacgccataatgcacttgataaaatatatggtcgcgctttaaaagacggaacagctacagatgataaagcgattatttttagcgggcgaatctcctcagaaatcctcgttaagacagctaaattaggatgcggaataattttatctcgctctgcacctaccgaactggcgatcaatatggcagaagaattgaacattacgacagttggcttcatccgcggggacaggttaaatgtctattctggatttgaacgaatcacttaagtttgatatgatgcagtaaaataggacggtaaggtgaatagagaaaatgaaacaaattttagtagtagatgatgaccggcacattcttaaacttgtagggcactatctccgcgcagaaggttttcatgtgttagaagctagtgatggcgtagaaggagaaaagatagtggaaacggagcaagttcatttggcggtgattgatgtgatgatgcccaacatggatggctttgaactatgcaaaaaactgcgcataagctatcctgatatccccgttattatgctgacagccaaagatgcacttgcggataaatcgcgcggttttgaagtggggacggatgactatgtcactaaaccctttgaacccgaggagttgatttttcgaatacgggctttacttagacgttccaatcaggctagtgaagcgaaaattactatcggaaatatcaccatcgaccaaaaaagttacggcataaaaattggcaaccaagaacggatgattcctgtaaaagaatttgaactgttatatcaattagcgagctatcccggtcggatttttactcgggaagaattaattgaacggatttggcaacgcgattacgacggcagtgaccgaacagtagatgtacatattaaacgtttgcgcgaccattttgatgaggaaaaggacgggattcggattgtcacggttcgcggtgttggctataaattggaggaaacaacatgaagtcattatatagtcgaatagttgtgacgatgctagttgtcattctttccagtagcctgctcggttttttctttgcgaacatttattaccagataaaattaaaaccttttaatgatgaaaaaacggctaagatagctgaggaagtccaacaattttatcagtcgaatagggcgatttctctaaaagagtacttggaaaatgtaggtgaacttggctatgaactgtatctgacggatggcaaagatcaatcgagttatttcggtggtgcgtttcgaaaaaaagatttacctaacaaaacagttcaacaagtgttagcgggcgagacttatcacgggattgatacgtttgatacgggcatttttatcacaggattttttgataatgatgtcaggaatacaattggtgttccagttaaggcggacggggagcaactggcgctttttatacgtcaagatccggaacagcaattcggtgaacttagaatctttttcgcgatgatacttgttttcacatctattattagtatcttatttgtgcttattagtggccgatacatagtgaaaccagttgtgaagcttacgaatgctacgaaaaaaatccggagaggaaattacgatgtggcgctcgaagtccggcgtaaagacgagattggtcagctggcggactcgtttgccaaaatggcgagcgaactcgaaaaatctgaagcagcccgtcaggaatttgtcgcaaatgtttctcatgaactacaatcaccacttacatcgatgcaaggtttcgccagacttttaggttcaggaacactaaccgaaaaagaacaaaaagaatatttaactgttttatccgaggagacgacacgcctttcttctttaacgaaacagttacttacacttgcttcacttgaccaagaatctgagttacggaaaaaagaaccagtgcaattagcagaacagtggcgccaactaatccaaatgactgaatggagttggcgagagaaagaactaacaataaatctagagttagctgatataaactattctggagatgccgaattactttatcaagtctggtctaatttattaaacaatgcaattaaatatacaccactgggcgggaatatccaggtgcgcctttatgaagaaacgaccaatgtttttgttgaagtctggaatagtggcgctggcatcagcaaagaagatatggcgaagattttcgaccgtttttataaagcaagtcaaagtcgcacccgagaagaaggttcaagcggcttaggcttatccatttgcaaaaaaataattacgttacatcatggtgaaatcactgttgaaagtaatactgataaaggaacaacattcaaagtcaagctacctaaaaactaaatttgtaaaatccgattcacattccgtttacaaaacttctttaaactaagtgtaagatcttagaaggagttgaacggaatgtttttggcattaagagaattaaaacactcaaaactacgctatattttaattggattaattatggtattaattgcctggctcgttttgtttgttacaggactagcgaatggactcgcaaatgataatggagcggcgatttcatcaaataaagcaacttattatgtactacaaaaagactcagataatcgcttaacgaggtccaatttaaccgcagctgaaacagaaagcgtagcaaagcaacttaaaaaatctgaaagcaccaacttaggcgtgcaaatgggaacaatcacaccacccaataaagacaaaaaaacagatattacttatttcggtatagataaaacgggctttatgaaaccgaccatctcagaaggaacagagccagagaaaacaaaagaagtagtagctgatatttctttaaaagagtctggttataaattaggcagcaaactcaaagacagcgcaacaggagaaacgttcactattactgcctttacgaaaaacaatacatttagccattccccggttatttttgttgattgggatgcttggaaattagttcatcaaacaaatcaagccgcagaaggagaatataatgctgtagcactaaatgtctctcgggataccgctaaaaatctatcaatcggctcgatggaattgtcctcaagtaaagaagtactccaaggcattccgggttattcagaagaacaaggttcgctactgatgatgattgcctttttattcgttatcgctgcatttgttctagctgctttcttttatgtcattacgattcaaaaaatcaatcaatttggtattttaaaagcagttggcgcacgaacagcttatttaggtcggagcatcgttacccaagttgttttcttatctgtcgtcagcttattgattggaaatggcctaacatttggactggcggcaattttgccagctagcatgccgtttacacttagtccaatacttgcaatcggttgttccgcattattcctagttgtagcagtcatcggatcaatgttatcactctatcgtgtagccaaagtggacgcgttagaagcaattgggagggcaaactaatgactttaatgatgaaaaatatttctaaaaattatcaagatggcgagcaagtcatcgaagtattgaaaagtgtttctttagaagtagcgcaaggagaatttgttgcaatcgtcggcccatctggtgcggggaaaagtacatttttatcaatcgcaggcgctttattatctccaacagaaggcgaaattgccattggtggaacgacattaaataacatgtctgaaaaagcattaacgaaggtgcgactcgacaaagttggctttattttccaaggtgccaacttaattccttacctaaatgttcgcgaccaactactcgtcattgcggaattatccggtgaaaaaggtagcgctgcgaaagaaagagcagataaattgcttcaagaattaggcttaaccgcgcgccaaaacaattatccagaaagcttatccggcggcgaaaaacaacgtgttgctattgctagagcgctgatgaacgaccccgatattattttagcagacgaaccaacagctagtttagatgcaaatcgcgggcacaaggtagttcaaatgattgcagatgaagtaaaacagaaaaataaagctgccatcatggttacacatgacgaacgagtgttagatttagtcgatcgtgtcattcgaattgaagatggctatttaaaagcagaataaaaatttggtcctcttgtgggggccaaatttttttagttatttatagaaatcctagcttagaaacaggctataaaatgtaagagtactagcaaaaagtcttgaaatagtacacgaaaataaccgattttgcactatttgcttaaaaatagcttatttcgtcactgaaccgtcacaaaaaacatagcgataagtctgtttttagtattctttaacaacgttcttcaagatataatcttaaagtgaataaataattggacgcctttaacgaaaatacaggtgctatttaattatgaacaatgaaataaaattaattataaatctaattttgcaacctagatgaggaggatcatatgaaaagaaaaatatgtttactaattgcagtaggagtaatccttttacaattaagcgcagacccatttgctatatgggcttcagaaaataatggaaacaacgtaaatgcggcagaaacagagacgacaaaatacaaattgatattatcaacccctaaacgtgataatttaatgggagaatatgaagcagacgaagtaattaaatctgccccagcaaatccagttattgaagggtataagttttggggatggtatgaagaaccaaatggttacggaataagatggtattttcaggataataaaatgccggctcatgatgtaactttatacgcatactttacaatagagacctacacagctacattaatctctgaagaaagaacagctacccaaccagttgtttatcaaaagaaaattaatgaacctacaaaaccagtaaaagatggttatacatttattgggtggtatgatgcagaaacaggcggtaaaaaatgggattttgctaacgatttaatgccggggaaaaacatcacattatatgctcaatttgcttctaaaacatatcctatgacctttgataatggcggggtaacaacgacagaaacagtggactatgatggtcttgcagaagaaccaacaacgccaacgaaagctggttacacatttgatggttggtatgacgcagaaacaggcggtaaaaagtggaattttgctcaagataagatgcctgcaaatccagtaactttatatgcccgttttacaatgaataattacactgcgacttttaataatgatggaacaacgacaacgcaaacagtcgattatcaagaagcgctaacagaaccaactgaaccgacaaaagatggttatacgtttgaaggttggtacgacgcacaaacaggcggaaacaaatggaatttcgcgacgaacaaaatgccggggaacaacatcacactatatgctcgttatagcgctaaatcttatacaacaacatttgacaaagaaggaacaacaacgacacaaacagctaattatgatagtcttttgacagaaccaacagcgccaacaaaagagggttacacatttgatggttggtatgatgcggagacgggcggaaacaaatgggattttgcaactgacaaaatgcctgccaagaacatcacactgtacgctcgtttcacagtcaaatcctatacagcgacatttgataaagacggaacgacaacgacacaaacagctaattatgatagtcttctgacagaaccgacagagccaacaaaagagggttacacatttgatggttggtatgatgccgagacaggcggaaacaaatggaattttgcaaccaaaaaaatgcctgccaagaatgtcacgctgtacgctcgttttacagtcaaatcatatacagcaacatttgacaaagacggaacgacaacgacacaaacagtcaattatgatagcctgattcaagcgccgacagagccaacaaaagccggttatatatttactggttggtatgatgccgaaacaggtggaaacaaatgggatttcacagcgaaaaaaatgccagcgaaaaacgtcacattatatgcccgttttagtgcaaatgcttatacagcaacatttgataaagatggaacaacaacgacacaagctgttgattacgacagtctaattacagaaccaacagccccaacaaaagacggctacacatttgatggttggtatgatgccgaaacaggtggaaataaatgggatttcgctgcgaaaaaaatgccagcgaaaaacatcacattatatgcccgttttagtacaaatgcttatacagcaacatttgataaagacggaacaacaacgacacaagccgttgattacgacagtctgattacggaaccaacagcaccgactaaagacggctacacatttgatggttggtatgatgccgaaacaggcggaaacaaatggaatttcgcagtgaaaaaaatgccagcgaaaaacgttacattatatgcccgttttagcacaaatgcttatacagcaacatttgataaagacggaacaacaacgacacaagccgttgattacgacagtctgcttacagaaccgacagcgccaacaaaagaaggccacacatttgatggttggtatgatgcggaaacaggtggaaacaaatgggactttgcagcaaataaaatgccagcaaaagacgttacgctatatgcccgttttaccgttaaatcatatactgccacacttaatggtgaagaagttacaacacaaacagttgactaccaaggattactacaagaaccgccagcacttacaaaagctggttatacatttgatggttggtatgatgccgaaacaggtggtaataaatgggattttgctacaaacaaaatgcctgctaatgatttagccttatatgcgcgctttacccaaaatccagtagttccggtagacccggtaaatccagtaaacccggtaaatccgataaacccagtaaacccagtaaacccagtaaacccagtaaacccagtaaacccagtaaacccagtaaacccagtaaacccagtaaatccgattcaaccagcagatccagcacatcaagacgatctaatggatgacatcttaccggcaactgagaacacaaacattactgctacgataaaaccagctaatgaccctgttaagaaaacaaaacaaagtaaagaattaccaaaaacaggcgaccaagaaaatatcctttatttattaatagggttattactaatcgctggaacgtttggctttttcaaaaaaatgtctcataaataaaaattgaaagccgcgtatgaagcatgatgttcatatgcggctttctttctcttttactagttaaattagtctctgtagggaattgtcgggaaaactagtttggcaccaaatgtgttcgtgcccctggaaagattctaattcttgtaaaatgcttcgcttacaaaaaaagatggcctctatgaaaatagagcccatcttttttgataaaatcatttttaaattttagtgagtacatccacttcggtcgggaatgctaaaaatgcaggaatttcccgtttaaatcgtttatagtgctctgttgaattatggaattgaatagcagcttcatctgcccatttttctaagagatagaaggtagatgcgtttttcacagaacgaactaattcatagccatggtttccggcttctgagagcgaattttggatgactagctccacttcttttaaaaatgattctataaagtctggtttcacttggattttcgcttctatgtgtatcaactgctatacctcctatttgtaatctaattggataactgtttcatctgttttgaatttttctaaaaaccaatatgttttctcgatgctcttaggtgtttcgtgtaatgtttggtgaaccgcgtcttctccaacttgaatatcttctatataagctttggcacttcctggcataaagagcctggttgcgagtgaactaatcgttgggacaatcccgtctgttgggttatcttcgcttaattcacctgcaattgcaagtacttctaaatcaggacttacctctgtttgatttttaataaaataatccatttgaggagtactatttggcaattttttaaatgatagatccattccgttatcgtttgggtctaagtcattaaatggtgaaccaattgctactaacttacgcaaagtaggtacggttttatctcccgcgtaatcttccgcgtaataagttagtgctaaacctccattggaatgccctacaccgtccatttgtgtaaagccatatcgtgattttaaatcttccatcgcgatttttaaccatttggaccaatcgtcaggggttgcttgattttgctcgaagccgaattttataattgggcgtttggcatcttttgtaagcttaccttcgaacttgatttttccttctgaattaacagtcatagtcaatgcttcattagaacttctatattcgttcattagttggtctgccattttatcaagagaacttgcattaccgccgctcccatgaattaaaataattggtatttgatctttcaaatctactttaggaggctcgtaattatctgcctcatcgctattttggcatgcagcaagaattagcgtaccaaaaagcaaaatcatgattgtaataaaatatttcttcactaagtatcttcctccattccaaattattataccaaaaatcgacgtgacaatcatgtgaaactcgtctataatcaaaatacatactaacggaattatagaaaggtgcgaaaactattggcaaatgtagcgattgatacagttattacagacatggacggaacattactcgtaaaaaaaggagatcaaattcatcccctaaataaagaagttttaataaattggcaagcagacggaaaaaaacttttccttgcgacaggtcgactagacttagctattttgccatttatccatgaactcaatattaaaacacctgttatttcttgtaatggtggattagtacgtgattttacgactggagaaattttatataaaagtaatattgagttagacctagtgcatactgtattagaaacgcttgaaccattaggtgttaactcccatatttatacaacagaacgaattattggaccaccaaatactggcaaaatcgctttcttcaatgagttaaataaacttttatcagaaaatgagcaagttccaattactttaacaacagatcctttcagtgtgctccgcgaaggtgagttcccgctaaaagttctcgtaattgagtctgacttagaaaaacgagcagaaatcaaagcagctctgcaaggtttaccgctatctgtcctagcttctgcatctaatttaattgatattatgaatgaaggtattgataaagcaaaaggccttacatacctagcagataatggttacattaatttaaattcaactatcgcttttggtgataatgaaaatgatgttggcatgattgaactagcagagattggcgtagctatggaaaacggtattccgcttgctttagaaaaagctgataaaattgcaaaacatcatgatattggtggattaggcttatttatgcaagaagaaattttataaaatatgtgtgaaacttccacttaaatcaagagtggaagttttttctttgaagaaagcttgcgttaaaaatgtatatatgctaacatatgcatataaagaaattaggtctttacagaggggaagtaatcatatggcacataatcacgatcatgcacatggtcacaaccataaccatacgcataatgccaacaaaaaatcattatttattagttttatcctaatcgctacttttatgatagttgaagttattggtggaattatgaccaatagtttggcactactttctgatgctggacatatgctttctgatgctgtggcattaggtttaagtttggctgcatttaagttcggcgaaaaagcagcaagttctgataaaacctatggctataaacgctttgaaattttagcagcatttctgaatggattgacgctcgttgggatttctgtttttattttctatgaagcaattggacgtttctttgacccaccacaagtaattggagcaggaatgatgactatttctgtcattggattgcttattaatattttagttgcttggattttaatgaaaggtgatacgagcgaaaacttgaacatgcgtagtgctttcttgcatgtgctaggtgacttgcttggatctgttggtgctattactgctgcgctactcattattttctttggctggaatatcgctgacccaatcgcgagtgttatcgttgcagcgctaattttagttagtggctggcgcgtgttaaaagacgctatccatattttgatggaagggaaacctgcgaacgttgatacagaagaaatcaaaactttcttccaagaacaagatggcgtgactgaagtgcatgatttacatgtatgggcgattacttctgattttaacgctcttacagctcatttaaccgtagctgaagacgcagaccgagataaaattttaactgatattgagcattatttacaagaaaacttctcgctagaacatagtacgattcaattagaaggaagtcatgctcaccatcatcactgcaattaatacaacttcatgatatgattactatatcaattagaggagttggtttagatggaagaacaagttgatttaggtcattttttgaaaaaaacttttatcgctgtagttgccgtaaccttagtatttatcggggttctagcaatgttcacaatcatcggtgttattatcgctatcccactactaaaaaaagctagcaaaatgcttcttacaaaaaaagaagatagcgaccatactcattcacacggcggcaaaataaaaataaaatgcccagcttgtaatgcaaaaatgaaattcaaagatagcgaaatactcgacgaaaaataacttttaaagccttctctataaatttgaggaggcttttttatgtaaatgtgcattattttaagaaattcgggaaaaggaaacgagaggtgttgtcaaatgaaagtggtaggattaacaaaggcatcaactgatttcgtggatatggaaattaaacaaccagtgccagaaaatcatgatttattagtaaaaattaaggcgatttccatcaatccagtagacactaaacaacgcgaagcgaccaaactaaccggagatgaagtaaggattttaggttgggatgcagttggtgaagtagtggagattggttcaaaagtgactttatttaaaacaggacaagaagtgtatttcgcaggtgatgttacaaggcctggcgcatatgctgaattcacgttaattgatgaacggctagtcggtttaaaacccaaacatttaagtttagaagaagccgctgcgatgccactgacaactattactgcatgggaagctctttttgaccgtttgggaattgttgaagccgataaaggaaaatccattttaattattaatggagctgggggagtgggttcgattgcgactcaactagctgcaaacattggacttaatgttatcgctacagcatcacgtgaagaaacaatagaatggacgaagaaacacggtgcaaatcacatcattaatcaccgagaaaatttaacaaaacaattgaaagaacttggttttgaacaaggtgtcgactttattttgtgtttgcataatacaaatgctcactgggatgacatgcaagaagcaattcgaccacaaggaaaaatttgttcgattgtggaacttgcagaaccagtgaagatgtctcttttaaaagacaagagtgctacttttagctatgaatttatgtttactcgttcgaaatacaatacagaagataaaatcaaacagcatgaaattcttacagaagcggcgcgcatgctagataaaggagacttaacatcaacattaaataaagtcttatctcctgtaaatgcaaaaacgatagaagaagctcacaaaattatctcatccggaaaaatgattggaaaattagtagtgaaaggatttgagtgattatgagtgaaaaacaagttgcgctatatatcgcagtgagtttggacggctacattgcggatgaaaacggcagcgtagaatggctagaatctgttgatagcgaaggcgatgcaggttatgaggccttctttgataacgtggatacagtcgtaatgggacgaactacgtatcaacaaattttctcgcttacagatacttttccatatagtaaaaaagatgtctatgttttttctaacacaaaagcagggacaaaagacgaatacgctgattttgtcgctggcacagtagatacgtggctaaacaacatcgatggtgaaaaagtctggcttgtcggcggcgcgcagttagtgaaacaatttttaaaagaaaaggcgattgatcggtttgtaattacgattgcgcctatcattttagggaaaggaattccgttatttgaagaagatcaagaacatgcgttagaacttgaagaagtgactcgtttcggacaatttgctcaacttacttataaaaatttggaggaaaagtaaatgaaaattgcagcttttgatattgattcacaaaaaggctttacaccactttgtccggatgaattaccagtttcgggcggtgacaaaattgtgccggagcttaattttatggcaagtcttgctactctacgaattggtagtaaagacgcgcatcccaaaaatgccgtatgggtagttgattccaaagacgaaatgctggctgaactcgaatatccaaatgcggaccggacttgggttagacactgcgaacccggtacgaaaggttttgaattattagacggattgccagttgtgacggattatgattactttatttggaaaggcatggagccagacattcatccgtacggcgcttgttatcacgatattgtcgaacagctttcaacaggtgtactagaatatttaagagaacaacaggtggatttagttcttgttggaggtttagcatttgatttttgtgtgaaaactacggttatacagttaagtagggcaggcttttctgtattagtttatttaccagcgacacgtgcattatctgaacaaggttttgatgaaacaaaagagcaattagcgaataccgagaaagttcaacttatcgaaacaagggaggaacttgtcgcctactgccagtaattatattggaagaggtgaggggaatgaggaaagttggtttatttcctagtatgataattcttttcacagtaggaatttctgctgtgttatatccgctactaccttctgaagtggcggtgcatttcggtacggacttctccccagatatgtttatgcaaaagtggctcggcttaatactgattccctttttaatgattatgtttacaggaacggaatactacgggaaagaaaaagtgaatcaagagagtttattagaatttgaatactgttttagactgttactcgtgttacttacgattattcaaatgagtataattgtatatgcgctaggttatgatattccaactggcagactatcgctagtgacagcaggagcatttatgtttgttgtcgcagcttacattcaatattctaaaaaactctttaaatttttaacgatgattggttttaaaaagattgatgcatggtcaagaaatctacttagaaaaattacaactgttacacttaatatagctggtacaatctgttttatcctagctttgttcatgcgaaatgatcccagctacttaatgttagcaatgttaatgacgatgtgtgttattgttgttggctctggagtttatcttaataagaaataaaaatataacagtttatatttacaattgatacagtttcggtttataatggtggcggaagttctgcgcgaatttggcaggaagtccgtcatttttttgcgtaatcaaaaagcgcttacaaaaagaggaggagaaattttgcataaaacagccagaaaaatggtagtggcactcagtttgttatgtttactagtacttacagcatgtcagtctggcgataaaggggaaagtgaaaaagtaacatcagaaaagaaagcaaaagttgttaacatcatggaaacgagtggaattccaaatgcaagtccaacactcgcagacaatagcgtaagttttcgagtaatcaatcagatttttgaaggattatatcgattagataaaaatggaaaaccggcactcgctctagctgccagtgaacctgaagaaaaagatggcgggaaaacacttattttcaaaattcgcgatgatgcgaagtggtctaacggcgacccagtgacggctcatgattttgagtatgcttggaaaaaaatagttgatccaaaaacagcagctgcatacggaccgcaaatggaagaaattgtcaaaaacgcaacccaaattttaaaaggtgaaatgtccccggatgaacttggaattaaagcgctagacgacaaaacacttcaaatcgaattagaaaatcctgtaccaattttcaaagagctcttaacgactggcacgttcttcccacaaaaccaagcattcgtggaaaaacaaggtgatcgttatggaacaaaaagcgacactttaatttcaaatggtccttacaaactagaaaattggaatggcacaaatatgacttgggattacgttaaaaacccaacttattgggataaaaagaatgttcctacagagaaaatccatgtaactgtcgtcaaagataccaatgcggccttaaatttatacaacacaaataaattagaccgagtagagcttgacggcgaatttgttaaacaatataaagatgataaaaatttccataaagaagcaactggacgttctgtctatatgaagatgaatcaaggcaaagatggcatgaaaacggatttagccaacttgaatttacgtcgagctctagcaatggctattgataaaacaggcatggtcaacacacttcttgctaacggttctaaagctttaaatggcgacgttccggctgatattatgttcgatccagaaacaaaagaagatttccgtaaacaaaatggtgatttactcaaatttgatcaacaagaagcaataagcgcttggaaacaaggcttaaaagaaattggaaaatcagaattaacactgactttaacaagtggtgatacatctctacaacgcaaacaaacagaatttatccaaaatcaattggaagaaaaccttcctggactaactatcaaactaaaaaatgttacgaaccaagctagtttccaagcggacgttacacaagactttgaactactactaggaggttggggaggcgattatcaagacccactaacatatctcaacctattccttacaaacagcccaggaaaccatacaggcttctcagacgcgaaatacgatgaactagtccttggagcgaaaggtaaactctcagcagatccggaaaaaagatggcaagccctactagaagccgaacaaatcttgctgaaagataacgccgtactcattccgctgtatcaaggcggtcgagcatacttgcaaaaaagcaatcttaaaaactatacaacctatccaattggatcagaaaactacaaatggattgaaaaaaattaatttaaaatgagtctagttaactttactagactcattttttgtacccgaatgaaaataagacttaggatgtaccaattttcagcctagagccgttcgttccttttttgaatctcccctataataaacctatcaacaaaaaaggacggtaaaaacaatgaaaaagggacttttcggtttactggctgcaatttttgtattaacaatggttgtaattgaattttcggcaccagttggatcagcagcaaatacatattacgttacaatcaaaaacgatggaaaagaagttaccaagtcaaagttcaaagggtattctttccgcgaatcgtgtctagataatcaaggaaacagtcacaaagttaacttcatgtcaactacacaacttaaaaagaacaaacagtataaaatcgtcgttcaagacaacgaactactcgttcaagccaaggaaataaacagtgttccacttgcaagtagtaaataaaaattagaaatgaggaattgaaaatgaatagtttttggaaaatattttttacagttattttaggatttattgcacttaatatcgtacttgatattgttggaattacacttcacttcttattcccagtccttgtattaggtggaattggatatttactttatcgcatgtggggaaattccccgaaacatacaagtcaacgcgacaataaagaccgttacgactggtaatcttttgctaaataagctccctaggcttttagatatacagaacctaatttcttttacagaagttaggtttttttgtatggtaagtttgttataataaggtaaaggaaatgaggcgatgaaaatgaaaaaagatataattaccaaatctattgttatatcaatcattactgccctagttttcaacatcagacgtaaaaaagtaaaataagtacagaaaaatcaaaaataacgattaaatggctattttaagccgtttgtaactaaagtcggaacggatatgctataataacaaaaagaaattcttggaggacatagagatggacattgaaaatacactactaaagcaagaagcatggcgtttcattgataacacgacaatcaatccagcttttgatgctattcaatcttttgcgactgacgatacgttatgtcgttcagttggagcaagaatggtgccgcccactgttcgaggctgggttcatgaaaaaacagtttcccttggaatacaagattccaagttaccggatatagataaaggaattgcttttttgcaagaacaaggttatcgagtcgttgtgcgcaattccggtggtttagcggttgtgcttgattcaggagtgcttaacttgtcaatggtacttccagatgccgaacgtggaattgcgattgaacgaggttacgaaaccatgtttaccttaattaaagatatgtttgtagattgtaatgaagtaattgaagcgaaagaaattgtgaattcttattgtcctggaagctatgatcttagcattcaagggcagaaatttgctggtatttcacagcgcagaatggctaaaggcgtcgctgttcaaatttatttagctgttgaaggtgaccaagccgcgcgctcggaactaattcgtgatttctatacaatcagcggaaaagataagcaaaccaaatacagttttccagatgtaaagccagaagttatgggtacattgtcagatttaatgaaagagaatatgactgttaatggatgtttagtacgattatttaatagtttgcgtcattatgcaggaaaacttgaatcaggtaccctgacaccagaagaactcgatttatttccagcctactatgaacgtttaattgcccgaaatgataaagtgctttcttaaattacataaaaggagagggtagcgtgagttatttaacggaaaagttaattgaagaaaaagtgttcaaagatcctgttcatggttacgtacatgtttctgataagttaatttgggatttaattgcaacaaaagaatttcagcggttgcgacgaatacaccaattaggcacgacttcgcttacgttccacggagccgaacatagtcgtttcaatcattctttaggtgtgtatgagattgttcgtcaaattattgatgtgacttttgcaaaagaaccacaattagattctgaagaacgaatggttgctttatgtgccgcgcttttacacgatttaggtcatggtccgttttctcatgcgtttgagaaggtttttggcacggaccatgaggagtatacacaagcgattattattggtaatacagaagttagcgaagtgctttcgcgagttagcgatgattttccactcaaggttgcctcgattattaagaaaaactatcctaatcaaacgctagtcaagttgatctcaagccaaattgacgcagaccgaatggattacttattacgagatgcgtattatacaggggttagttatgggaagtttgatttagaacggattttacgagtgcttcgacctagccctgatggtaatggagttattgtgaagtactccggaatgcatgctgtggaagattatattatgagtcgttaccaaatgtatcagcaagtgtattttcatccagtgagccgtagtggggaagtattgttatggaaaatcctcgaacgagcgaagaagttgtattgcgcgggttatgattttaaagtctcacccattcaagttttaccgttttttgtaaatgaagtgagtttaaaagactatattgtgcttgatgatattgttttaatgtactatttctcaatttggcaagaggaaacggatccgattttgagcgatttatgcagccgctttttaaatagaagattgctcaggtatcttaattataatccgaaagaagatgccgaactatacgctgaattaaaaggattgttagaaaaagctgatatcgatccctcgtactatttagtagttgattcctctagtgacctgccgtatgattattatcttccaggcgttggtggtggaaaagaacctataaaactgctcatgggaaatggcgaactgcgtgaactgtcgactgaatcaccagttgttgaggcaatcgggcgggaacgtcgaacagacatcaagctatattatccgcttgacttcattgaaagcggacgagtggagccggagatagcagaaagaatgatttcattaattcatgcgcattcattaaaagaaaaataaaagaagcaaggcgattaaaaccttgcttctagtaatgcttaaatatcagattttcttacgccgccaacaccgtaatcagtttttttcatttcttctaaaattacgtgaatattttcttttggcgcctttaggtttttagaaactacgtcagttacttcgctgactaaagctttcttttggtcatcactacgaccttctaagaattgaatggtaacaaatggcattttctcacctcgataaaagtttttttcattatagcacataaaaattactctataaaagataaaggaggcgcttatgcctagttttctcgcttatccacttgaaatgataccttatgttgtagttacacttttaattgcctttacgattcacgaatgggcgcatgcgttagtagctctagcgtttggggatgataccgcaaaaaatcaaggtcgtttatccctaaatccacttgtacatattgatttgtttggcttattaatgattttaattgctggattcggttgggcgaaaccaaccccagtcaatcgttttaaattaaagaaaagacgtcttggtagtattcttgtcactcttgctggtccggtaagtaaccttctactagcaatgattggtgttggtttgtacgctctttttctgaactatgcatttttcacttacggttcagttacggaaacgtttttaatgatttttgtgcaattaaatcttgttttatttgtatttaatttaattccaattccaccgttagatggttaccaaatattagtagaattcttaccgatgtcagctagagctaaacttgagccagtggaacgctatgcaatgcttattttcttagttatagctttaacaccaatttccaattttactattcaaccaattttcgacactgttattccgtttgtttttgatataatattgatgattttcggactatcagcattttaacctgttgcttttcatgctatttttcactataatataatgcgtctattcttctgaccggaaaggggtaaataagcgatatgacagccaatcaaatggaacgaaaaaaagtaactattcatatcaccaatgtcatccgtcagatggatgcagaagagaaatccgatatgtctgtttcgggtgttttctaccgcgataaagggaatcgctatctgcattatgaggaaaaacaattagctggaacgattcgcacggttcttaaaattgctgacaacgagctgcttttaatgagaagcggtgccgtaaatatgagaatgcactttttccgagataataggagaagtactgcttctgttgattcaggggcggggaaattacaattagaatcagaactagtatcaatggaagaactatatgaaaataagccggatgtgcttagtgaagttgcatttcaatatgatttgcttagtcacggcgaatacatcggctcatatactgttttaatgaaaatagaggaggacgcagaatgaatgtcatgcaagagaaccaaatcaaactaattgaacatatcaaacaagcagttgttcaagcggttggtttagaagaaacagaagtaccagaaattttactcgaagtaccaaaagacaagaagcatggagattattcgactaatattgcgatgcagcttgctagagttgctaagaaagcgcctcgtcaaattgccgaaagtatcgttcctgagttaaaaaaagacaccaaattaattaaagaagtagaaattgctggacctggttttattaatttttatttagataatgcttatttaacagatttagtaccagtcatcttaactgaggataaaaagtacggagaatcagatttcggtaaaggtgaaaaattccaaattgaattcgtttccgctaacccgactggcgacttacatcttgggcatgcccgtggagctgcaattggagattctcttgcaaacattatgaaaatggccggatttgatgtttccagagaatattatattaatgatgctgggaatcaaattaataatttagttctttcagcagaagcgcgctattttgaagcgttaggcttagaatctgaatttccagaggatggttaccgcggttcagatattatcgcacttgggaaagatttagccgctaaatacggcgataaatatgtgaatgctagcgaagaagagcgccgttccgttttccgtgtagatgcacttgcatttgaaacaggaaaactacgggcagacttagaagaattccgtgtttcttttgatgagtggttttcagaaacgtcattatatgaagaaaacaaagtattacctgccttagaacgtttacgcgaaaatggctatatttatgagcaagatggagctacttggttaagaacaactgattttgaagatgataaagatcgagttttaatcaaatcagatggtagctacacttatttcttaccagacattgcttatcatttaaataaattagagcgtggtttcgacgtattaattgatatttggggagcggatcatcacggttatattccgcggatgcgtgctgcgattgaagcgcttggttactcaccgaatcaattagaagtagaaatcattcagctggttcacttatttgaagatggcgtgcaagttaaaatgagtaaacgtactggtaaatctgttacaatgcgtgacttaattgaagaagttggtctggatgcgacgagatatttctttgcaatgcgtagttctgatactcatatgaacttcgatatgagtttagcaaaatcaacgtccaacgataatcctgtttattatgtacaatatgcccatgcgagaatttctagtattttacgttctggcaaagagcaaggcttggaagtttcaaaagatgctaatatgagccttttagaaactgaagcagaatatgacttattaaaagtattaggtgagttcgcagatgttgttgctgaagccgcagtaaaaagagcgccacaccgtatcgttcgctacttaaatgatttagcgacagcattccaccgtttttataatagtaataaagtgctcgatatggataacctagaagttacaaaagcgagactagcactgattaaaacagcacaaattacccttcgaaatggtttgacccttcttggtgtatctgcaccagaaaaaatgtgatatcctaaaaatataggttactcgttgacgtcataaccaaaatgtactaaagttaaaagaaacataggtaattgaaaaaaacggggagagcatatgatgaagcgattaataattttggcgctgcttttcgtgtttctgtgcgtcgcagtctatattctctacgactttcaacttggatcaatcccaattcttttaatggccatcctattcttttacatcggatataaaatagtcaagaagaattgatgtaattaagaaaatttaggttgtacttgccagaaataacatgtaaaatagtgaagttgggctgaacgaaaaaataacagctaaataaattggaattacgatagaaagggcgtgccagttttggatttaaagaacttaacgcaagaagaacgtagtgaactatctttaattgatgttgcacattttattttggaacagcggaaagaaaccattcttttccctgaattagtgaaagagattcaagcgttcctaggtttgaaagatgcagaaataagggagcgtcttgttcaattttatacagatatgaatattgatggtaacttcatttcactaggaaataatacgtggggacttcgtgcatggtatccaatggatgcaattgatgaggaagttcaaacgcaaacaactccgaagaaaaaacgtaaatcagatgatgatgacgatgaagatgaagaaatcctggacgatgacgtggactacgatgatgaagaaatcgtggaagagcttggtgaagaagaaatctctcttgcggatgtcttacttgatgaagacgaagatgacgatgaccacttgccagacggtatcgaaggcgatttagctacagtagaagatgattatactgatggagattatacagaagacccagaagataaataataactaaatgttaatcagatagatacatccatttttatggaaagcgtctatctgatttttttaacgtatttaatgggttgatggcggtttcaaaaaataaaggcttgacttatctcgctatcattagtagtattttatttgggctcccttttatagggacggatatttatgagaatcagcgctcccttacttttaaaaagtaggcggagtgttttttattttggtttacaaaatacttgaaattgtgattagtacgctagcaagataatcacaatattgttttatctggcaatttcccaccccagcaggaaaatcgtcagaccctgcaagtttttcatttcaggaaggagtagatttttttaacatgacaaagtatattttcgttacaggtggcgtagtttcgtcaatcggaaaaggaatcacagcagcatcgctcggacgtttgctgaaaaatcgtggacttagtgttaccattcaaaaatttgatccatacattaacgtggatccaggaacaatgagcccataccaacacggggaagtttatgtgacagatgatggcgcagaaacagacctagaccttggccattacgaacgttttatcgatattaacttaaataaatacagcaatgtaacaactggtaaagtttactcagaagttattaaaaaagaacgtcgcggggattacttaggtggaacagtgcaagttattccacacattacaaacgaattaaaagatcgtgttttccgtgcagctcgcatgaccaattcagatattattatcacagagattggtggaactgtaggagacatcgaatcattaccattcttagaagcaattcgtcaaattaaaagtgatgttggtgcggaaaacgtactttacatccacacaactttaattccttatatcaaagcagctggtgaaatgaaaactaaaccaactcaacatagcgttaaagaacttcgcagtctaggaattcaaccaaacattatcgttgttcgtacagagcaaccagtttctcaagaaatgaaagataagattgcgctattttgtgatattaaagcttcagaggttattgaatctcgtgatgaagaaacactttataacgtaccgctttctttacaaaaacaaaaaatggatgatattgtcctagaacacttgcaattagaagcaccgcaagctgaaatgactgattggaaaaacttagtacaccgcgtgaaaaacctatccaaaaaagttcgtatcggtctagttggtaaatatgtatccttacaagatgcttatctttctgtagcagaagcacttcgtcatgcaggatatgagcacgatgcggaaatcgaaatcgactggattgattccgaaaaagtaacaaaagaaaatgttgctgaaatcatgaaagacgttgatggtattttagttcctggtggttttggagatcgtgccatcgaaggtaaaattgctgctatcgaatatgcacgcgtaaataaagtgccttattttggtatttgtttaggtatgcaactagcaacagtcgaatttgctcgtaacgtgcttggtcttgaaggagcgcattcagcagaaatcgaaccagaaacaaaacataacatcattgatttattaccagaacaaaaaaatatcgaaaacatgggtggaacacttcgtctaggactgtatccagcacgtattaagcagggcactaaagctgaggctgcttatggtacaactcttgtagaagagcgtcaccgtcaccgttatgagtttaataacgaatatagagaacaaatggaagaagctggcatgattgtgtctgcaacgagcccagatggccgcctagttgaagtagttgaattagctgaccatccttggtttgtcgcttgtcaatatcacccagaattcatttcccgtccaaatcgtccgcaaagcttgtttaaagattttgttggtgctgcgcttaataacaaataaggtaataaaaaaatctcccagccatttatggctgggagattttttattattatttagtagcactaaggttcgaagcttttgtccaaccaataaaggtggagcttgttcttattcgataccaaagttgtccttcgaccgttgcttgtttatccacggtgagtttttgacctttgtaagcagctaaagtgccccatctaacatccgcatctacaacaggaactttgtagtacgcttcgtttactttgttcgcaatcacatagcgagttaaattagtatctttctccatgctttgcttatagaacgtatcaagtgcacgagtatcaacccaaccgattactttcccatcaatactaaattgataccacgtagtaattactgttttagcttcgcgcaggatacgcatgtttttaccttggtagaccgaaagttgattaacaagtttagagccttctgttctgtatggtttcgtccaaacagcgttgcctggagcagttttcactctagcataggctgtaacacctttatcatattcgattgcatcgaatggaggggtagttgttaagttttcagctttagtccaaccgataaaagtagtgcttgttctaacgcggtaccaaagttgaccttcaacagtcgcttgactatctacggttaacttctcatttttataagttgcaagtgtaccccatttgacatctgaatcagctactggaactttgtagtaagcttcgcctgttttattggcagtgacataacgagttaaattagtcgattgctccatgctttgcttatagaatgtatcaagtgcacgagtatcgacccaaccgattacttttccatcaatgctaaattgataccaagtagtgattggtgttttagcttcgcgcaggattcgcatgtttttgccttgatagaccgaaagttgattaacaagtttagaaccttccgttctgtaaggtttcgtccaaacagcattgcctggcgccgtttttactctagcataggctgtgacacccttatcatattcgattttatcaaatggagaggtagctgttaagttggatgctttcgtccaaccaatgaaggtagacccagcttttacacggtaccaaagttgaccttccacagttgcttgtttatcgacggttagtttttcgcttttatatgtgcctatagtgccccatttgacatctgcatctacaaccggaactttgtagtacgcttcacctgttttgttggaagcgacatagcgagttaaattagcatctttctccatgctttgtttgtagaacgtatcaagtgcacgagtatcgacccaaccaattgttttgccgtcgatgctaaattgataccaagtagtgattggtgttttagcttcgcgcaggatccgcatgtttttgccttggtagaccgaaagttgattaacaagtttagagccttctgttctgtaaggtcttgtccaaacagcgttgcctggagctgttttcactctagcataggctgtgacgcctttatcgtattcgattttgtcgtaagtaactttgctagcttgaattgctttgtatttttcattaatcaacgtaacaaaactgttgaaattatagccccattggttgaaataacctacaggatcggtatgtgtagttccacctaaatagcgtgtaactgcatcatgagaccaaattgttcctttaccatcactgtgcgcactatccactggaagtttatattgatccaataggtaggccgcataataagcataattattgatagagcgtgcaaattcatcaaatgtcttcgaacgaactaattccacttggataaaacgagcgttggcatattgacctgctccccataccccattttcagttgggtggatttgaatgatacgagatttatctacaaatgaatgaacgaatgcattattgtagtttctgctcatataactaatttcgccctcaatagtggatgaattatttgctgtttcatgaatgacgacgccttctggtttcccgtaaccattacggtaattaaatttagggaattggctttttaattgtttttcaatggaagctgttgaaaatttattcgatttaatataggcatttacatcaggatatcctgttgtggcgcgaagtaaagaggttgtctttagtacgctattagtttcatcttcaaagccgtcatgttcttccgtagcagtcccatccctaatgccttggggaatataaatagattgatcatctaccttttgtactgtttcaatggaagaagcgcttgctttctctgtaatcaaggttgcggacgtgccaattaaagcaagacttgcaaaaacaaccgccgattttactaattttttcaaattttaaatcctctcctaactgctatatttattgctaataaataaaattattctacattaattatgacaacacgttaagtggtagtcaatgactaaaagcaacaatgaacctaattgcacatgttttttaatgtaaaagtaatataattaaaaaatggggcgaaaaatgtaatttaaaacatgatgaaagatgtaatttgtaataggtataaaggcttgtttggtgacttgctcccacatccagtcaaacaagttgacatcgcccatttaaaataggaaactaaacaatatctaaaggaaagagggagcagcaatttgcagaagaaagcgatgattatatataacccagcagcggggaaaaataaattcagaaaattacttccagatgccgaaaaaattttaacaaatgcggattttgaagtaactttagtcccgtcaacaccagcgccaaaaagcacaactttaatcgcgaaacaagcagcagaagcagggtatgaggtagtgattgcagcaggtggagatggaactgtgaatgaagttgttaacggactaatgcaagtagagaaaagaccaaaattaggtatcttgccagtaggtacaacaaacgattacgcaagagcactaaattttgcaaaagatccgctagaagcgcttcaaataatagctaagcaagaaactatccgagtagatattggaaaagcaaatgagacagaattttttattaataatgcagcaggtggacgaattacggaaataacttatgcggtaaaagaatcaatgaagtctaaatggggcagacttgcatatctctttagtggattaaccgttcttcctaagttgtcccctgttaacgttgaaataatttacaatgaagaaatttttaaaggagagatattactatttttcgtaaataaaaccaattctgttggcggcatggaaacgttatgtccgccagcgcaattaaatagtggtatgtttgagcttttaattttaaagaaggtttctcctaaaaaattattccaattatttgcttctataaaaaaagggacacatctaaatagtcctcatgttattcatgcccgtacaaataaagttactattaaaagtgacgcagatttaaatgtaagttacgatggggtttatggtggaaaagcgccttatacgttagaggtgattccagaagcgttagaagtatttgctgatgaaaaaagaatttcagcccgtcttagaggctaaagcgttttcaccagaaaattttctagtttttatggtaaattcatcacaaatctgttatcataagtttgttaggggaaaatagctgccactatttttcacggcggaaattcaaatcttaggggaaatcaaaaatggttttcctaaattcctgagggaggaaattgtattatgcctatcgttaacatgacagacatgctgaaaaaagcattagctggaaaatatgctgttggtcaattcaacatcaacaaccttgaatggactcaagctattttgaaagctgcagaagcagaaaaattcccacagtattttaggagtttctgaaggagctgctaaatacatgggaggattcaaaacagttgtaaaaatgactgaaggacttgtagaagacctgaaaatcactgtacctgttgcgattcaccttgaccatggttcaagctttgattcttgtaaagcagctatcgatgcaggattctcttctgtaatgatcgacggctctcaccacccaattgatgataatattgcaatgactaaacaagttgttgattatgcgcatgctaaaggcgtatctgtagaagctgaaattggaactgttggtggagatgaagacggcgttactggtggaatcaactatgctgatccacaagaatgtttacgtgttgttaaagaagctaacattgatgcacttgctgcagcattaggttctgttcacggtccttaccacggcgaaccagttcttggttttgacgaaatgaaagaaatctccgaacttacaggtgctccacttgtacttcacggcggttctggaattcctgaacaccaaattaaaaaagcaattgaacttggtcacagcaaaatcaacgttaacactgaatgccaaatcgtttggactgcagctgttcgcgaaaaattagctactgatgacaaagtttatgatccacgtaaagtaatcggccctggtgtggacgcgattatcaaaactgtaacagaaaaaattcaagagtttggttctaacggtaaagcgtaagacgaactttatgatgatataaaaaataactggttagaatcacttgttgatttgaccagttattttttatgtaaagtttaagtacttatagaaggaaattaattatcgttatcaagatgaatatggtatgataactatagctttcggtcaaaagaaatcaagatttgtaatttcccgattaaaaatcatgcttcaggcgcatgttttatctagataaatgagccataatgtagttagttatgtgatacgacttactatagttatgttataatagtatattaaatgatgaatgaaccaacgaggaagagagtaggcgatagtaatgaatatagggatttttacggatacctacagtccgcaaattagcggtgtagctacatcgataatgattatggaaaacgaactaagaaaacaagggcacactgtatatatttttacaacgacggatcctaacgctgatagagaaagcgaagaaggacgtgtgtttcgtttacctagcataccgtttgtcttttttccagaacgtcgcgtagcaattgcaggaatgaataagtttattaagctagtaggtcgcttaaatttagacattatccacacacatacagagttttcattaggtcttttgggtaagcgaattgctaaaaaatataatattccatctatccatacctaccacacaatgtatgttgattacttgcactatatcgcaaaaggtaaaattttaacgccttcaatggttggcaaaatgacaaaatctttttgtgatagctatgatgccataatcactccaactgcaaaggtaaggcatcacttagaagagcaagggattcataaattaatgtatacagttccaactggtacagatatttcatcatttgctccggttgaaaaacagcgaattctggatttgaaacaatcacttggaattgaagaaaatgattctgtaattctttcgcttggaagaattgctcatgaaaaaaatatcgatgccattattaatgcgatgccagaagtccttgaaacgaaacctaatgcaaaactagtgattgttggagacgggccggtacgcaaagacttagaaaaattagtagaaaccaaacaattagaaaatcatgttattttcacaggggcagttgactgggaaaacattagtttatattatcaattaggtgatttatttgttagtgcttcaacgacagaaacacaaggtttaacttacgcagaagcaatggcggcctcgttaccagttgttgcaaaacgtgacgaaagtattgaaggctttttagcagataaagaaacagcctttttattcgataaagacgaggaactagcaagcctattaattaaaatattttctgataaagaaatggcgactttagtagctacaaatggaagagtaaaagtagaatcaatttccgcggaacaatttggcatcaatgttgagtctacatacaatgaggttcgcgaaatataccgtgtaaagcgacaaaacggcacgattaaagtaaagccgacattaataaaaagtaaaattgcttctcaagtattttcactttcgtcctctacgcacgtacaaaggaaagagaggtcatcgcggcgtgattaagttgacaatgctatcttcagcagaaaaagtaaaaggacaaggtgtagcatcagcttatcgcgaacttgtgaatttactagaagaaagatatacaaatgagattgatatgaagattaatagttttgagaaatcggatatcacgcattatcataccgttgatttccgtttttttctttcgaccttttttaagaagaaacgcggagtgcgagttggttatgtgcactttttgccagaaacaatggaaggtagtttgaaattgccttggattgctcgcgttgtgttttataaatatttaattagtttttataagcgaatggatgaaatagttgttgttaatccctcgttcattccaaaattaactgcatatgacatcccggaagaaaaaatccattatatacctaattttgtctcgaaaaaaacttttttcccaatttctacggcagaaaaaaagcttgctcgtgaaaaatatggaattccggctgataaattcaccgtaattgggataggtcaagttcaacatcgaaaaggtgtactcgactttattgaagtggcaaaacaattaccgcatatccagttcgtgtgggcgggaggattttcttttgggaagattacttcgggctatgaagaacttaagaaaatttatgataatccgccagcaaatgtgaaatttattggcattgtcgatcgttcagaaatgaatgcttgtattaatatggcggatttattctttatgccatcgtataatgagctgtttccaatggcgattttagaagcaatgagcgcggatgttcctattttgcttcgaaatttagaattatatgaagaaattttaactggctattatgtaaaagaagttgataatcctggttttatacgggctatagaacgcttggaacatgatactgattattataacgaaatgttgcaagccgctaaagagggcgcaacctattattcagaagatcgtttggcaaaaatatggtttgccttttatcaaggattattaacgaaggagtgagcatatgagtggaggcgcgaagaagaatctatttaatatagctattgtactggcgattagtatcggcttcattatttggcaatttcaaggcgtagatatttccacattctttgcttcgatgttaaaagtcaatccgtggtggcttctaggtgcatttgcggcgatgtttatttattggtttttagaagcagtcgttttacaaaccgcttcaaagcctgcaaataaagaccaacgattcttttcttcttttcggataacgatgattggtcaattttttaatacgattactccgatggcgacgggtggacaaccggcacagctcgtaatgttaacaaaacaaggcatggatgctggacgaggaagttctgttttactcgtgaaatttattatttatcaagcgatggttgtacttaattttttagttattttgattttcggtattcattacttgatgacaggggtaacgcagcttaaatttcttgttttgcttggttttggcgttcatgtggtagttatcgtagccttaattttagtcggtagaagtcagaaattcaccacaaaattagtacatgtgctattacttccgactagattatttatgaaaaaagaaaaagtcgcgaatttaaaaaatacactagacgaaaaaattattactttccatgaagaaagtagtcggattgggaaagattggaaattaattgtgcgctgttgtttttatacgacgctccaattatggatatatttctcaatacctttcttcattttacaagcaattggtgtaactggcattgggctgtatatggcgattacttatcacgcctttattattatgtttgctactgttatgccaactcctggaggcgcaggtggtgctgagtatacatttacgttgttgtttggtatgttgcttggaccagcaaaactattgatggcgctcgttttatggcgaattattacctattatagttgcattgtttttggggcaggagccttattaattaaagacacagcttctaaaaaaattaaacctcatatagaagcattaacaaaagcaccagtaaaaaatatttcgtcgtaatgaaaagcttggaatgaactgttcccggcttttttttgaagaaagaatcttgcaaagtaaaacaatttaatggataatgaaaaagtattacatgcttcaggaaagaagggtacatttgtgacgaataaattgattatacaaggtggcaaaaaattagccggaactttgcaagtagatggtgcaaaaaatagcgcagttgccttgattccagctgcaattttagcggaatctgaagtggttttagaaggtttaccagatatttcagatgtttatacactttatgatattttagaagaacttggcggcagtgtccgttatgataataaaacagcggtaattgatccagcagatatgatttctatgccacttccaacaggaaatgtgaagaaattgcgtgcgtcttattacttaatgggagcaatgctaggtcggtttaaaaaagcagttatcgggcttccaggtggctgttatttaggtccgcgtccaattgatcaacacattaaaggttttgaagcattaggcgcaaaagtaacgaatgaacaaggggctatttatttgcgggccgatgaattaaaaggagctcgtatttatttagacgttgtaagtgtaggtgcgactataaatattatgttagcagctgttcgcgcaaaaggaaaaacaattattgagaacgctgcaaaagaaccagaaattattgatgttgcaacgcttctttccaatatgggagcgattattaaaggtgctgggacagacactattcgaatcactggtgtggagcatcttcatggctgtcatcatacaattatccctgaccgaattgaagcaggaacatttatggtacttgccgcagcatcgggaaaaggcgtacgaattgagaatgttatcccaactcatttagaaggaatcatcgcaaaaatgacagagatgggaattccgatggatattgaagaagacgctatttttgttggggaagtagaaaaaatcaaaaaagtagatattaaaacatatgcgtatccaggttttccgactgacttgcaacaaccgttaacggcacttttaacccgtgcagaaggtagcagcgttgttactgacacgatttacccgagccgttttaagcatatagctgagattgagcgaatgggcgggaagttcaagttagaaggtcgatcggcggttgtaagtgggcctgttaaactccaaggttctaaagttacagcaactgatttacgtgccggagctgctctagttattgcggggcttttggcggaaggaacaacagaaattcatggtgttgaacatatcgaacgcggttatagtaaaattatcgaaaagctttctgcaattggcgctgatattactcgtagcactgcagcagaaactaaattataaaaaaagagaggctgagcgaatcagttcgcttcagccttccctcgatttcacctcattttccacttattcctaaaaacttataaaatattattaactcaaaaaggtggtacacatatggcaaaactgtccattgcatacttagaaagtttaacaataaaagatatttacgctttggcaaaagaacataaaattgcatattatagcaaactaacaaaaagagaacttatttttgctttactaaaatcaaatgccgaaaaagaaggtttcttttttatggaaggcgttttagagattattccgaatgaaggttttggttttttacggccaattaattattcttctagttcggaagatatttatatttcggcttctcaaattagacgttttgaattaaggactggggataaggtttctggaaaagtacgtcctccgaaagaaaatgaacgctattttggcttgctacatgtggaagcagttaacggcgaaaatcctgaagtagccaaagaaagagtgcatttcccaggacttactccgctttaccctgaccgtcaaattcatttggaaactggaaaaatgccaatttcgacgcggacaattgatttgatttcgccaattggttttgggcaacgtggactgattgtagcgccaccaaaagcaggtaagactgttttattaaaagaaattgcgaatgcgattacaactaatcatcctgagtctgaactgatcgttttactaatagatgaacgacctgaagaagtaactgatattgaacgctctgtaaaagcggatgttgttagctctacctttgatgaagttccagaaaatcatattaaagtagcagaattagtactggaacgtgcgatgcgtttagtagaacaaaaacgagatgttgttattttaatggatagtattactcgattagcaagagcctataaccttgtcattccgccaagtggtcgtacactttctggtggtattgatccagctgctttccatcgtcctaaacgcttctttggtgcagcacgtaatattgaggaaggcggaagtttgactatccttgcaacagcactagttgataccggttcacgaatggatgatgttatttacgaggaatttaaaggtactggtaacatggaattacatcttgaccgacaacttgctgagcgccgcgtctttcctgctatcgatatgcgccgttctggaacaagaaaagaagaattgctcttatctaaagaacgcttagaacaactttggaaaattcgaaaggcaatgccaaaacaaagcgatggattagatatttcagaacgctttgtcagatacctgaaaaaaaccgaaaacaatgaagcgttttatgaattattacaagaggaaatgtttaaaaaataaaccaaacctgtacttttcttattaattttgatactatcatttgtagggtaatgagcgaagtaataagaaggagaaagataatgaaactaattacaatatctgttcctgcatataatgaacaagaatccgttgttaaattgtatgaaactattgtcgaagtaatgggagctattaaagataaatatacgtttgagttattatttattaatgatggtagtaaagacaatacgctggaaatagtaaaacagttacatgaaaaagatgatcgagtaggttttgtggatttatcgagaaattatgggaaagaaatagcaatggctgctggttttgactatgccaaaggtgatgctgttattactatggatgcagacttacaacatccaccagagttgattacacaaatggttgagctctgggaattaggttatgaagatgtttatgcaagacgaaataaacgtcacggagaaagttggttaaaaaaagcaacatcaaaatcttattataagatgttacaaaaagtaactaaaacgccggttctaccagatactggtgattttcgtttgcttgatcgacgttgtgtagatgctataaaaaaattaagagaaactcaacgttatacaaaagggctttacaattggattggatttaagaaagtagaagtgacttttgatgctgcgccgagacatgctggtgaaacaaaatggaattatcgttcattgattaatttagctcttgaaggaatcacatcctataccacatggcctctaagattgtctactattgccggttttgcaatatcacttggaacgtttatttatttgatttacatcttaattaaaacattaattatgggttctaacgctagtggattcccgacattaatgattacaatactatttttaggtggaattcaattaacaagtataggtataattggagaatacttaggcagaatttttaatgaagtgaaaaaacggccgctttattttgtagaagaatataacggagagaaagaagatgtcaaatgagtagagtaaggcagttgctagacaaattaccatggtatacagacaatatacatagtattttgatgtatctaattatgggtggatttacaacacttataaatattgtaactttttggttatgtacagatgtattaaactgggattatagaattgcgaatactatagcatgggtagcatctgtactgtttgcatatttttctaataaaaaatatgtcttcgaaagctacacacctacttggaaagaaaaggcgagagaagtatcctctttctttggctttagatttttaacatatattgttgatttcttagtaatgattctgttaattagtggactaggaataaatgaactatgggcaaagatatggacaaatgtaatagtattaatattaaattatgtatttagtaaatggattatttttaaagtgagaaaataaagggatgtgtatctatgataaatagcataaaaaaagatggcgtcaagattggaatttttagttttattgtttttttgttttacttatatctgtcttattgtaccccgttaactcatgatgactggacttggggcatacgacttggaatgaatcgtttttatgatggttttaaagactataatggtcgttattttggtaatatatgtgaattaataattactagagtagattggttccgctttttaatcatgggagtatttggagctgcaatagtagtaataccccttttaattgcaaaagcaacaaagttaactatcgcttttctaagtctattcttgatgctaggtgtttccagtgatatgttttcttctacttttgcgtgggcagctggttttgctaactataatactgcaacgatttgtattttagtatatttactaattgtgaagaatattttttatgaaaaaaatcctagttattcagtttggttggtaatatttgctgttccacttggaattggctctcaattgtttgtagaacatgctacaatttataatgtatttgctggtgcgtttgttataatttatagctttatgaaatttagaaagttcttttatttccatattgtataccttatttcagccctcatcggagcagttataatgttttctaatggtgcctatgtaaaaatatttactggcgcagataattatcgaacaattgatactgatatgggaatttttgaaaaaatttattcaattttctcaactagcatgtataagtttttaattatgaacaatattttattgaactttgcattggctatattttgtattttcttgttagtgaaaattggaactaatctacctatttggaaggtatgggttaaaaacattttcatggtaatactaactatatatcctttctatcgaccacttattgttgatagaatgcagttaagtatttttacggatgtagctaagacttcagaacttgaagcttggatttcattattattttacttaactattctatttactatcattttatttttccgaaagagttctttaaaagtggagctaagtttttatctaatttctgcagtattcgttgcaggaccgttattctttgtaactccttttggatcaagatgttttattatttcctatacattttttgttttatttattatacgacttcttgtttattttgtggatgagggatatgttaatctaaatgctatcagtgttccgattataacgctttctttatctttagtagtcgcgtatggtattatttttgctcaaataaaaatatctgataatgacagaatggatagtattcaaaaacaaattgacgaaggtaaaaaagtggtaactgttaaaccactaaaacatgagaaattcttatggaatagtaggttaatgattcctggattccaagcagataacttcaagattttctttaacttacctaaagatatagaacttaaaaatgcgcctaagtaaaaattaaagcaaatggattatctaaagcacaaaaataatcttgcttgtttgcttcaacattgttataatatttatactgtgtgtaaaagcacttaattactctgtttcagatgattcagggcgaaggagttgaaaagaaatgaaaactggaattcatcctgagtaccgtccagtggtatttgttgatactagtactgatttcaaatttttgtcaggttctactaagagctcaagcgaaacaattaaatgggaagatggcaacgagtatccattacttcgtgtcgaaatctcttctgattcgcacccgttctatactggtaaacaaaaacatgcgactgcagacggccgtgtggaccgcttcaacaaaaaatacggtctcaaataagactgtatgtaacgaacgaaataatttgcgcactcagcttttgctgggtgtgtttttttatggaattatttcctgagactactaaaaataaaaactttcccttcaagggtttacttttccctgtgaagttgcgtataatatcactaattactttttttatgagtaggtaataaaaaagttaaattttctgttttgttaaacaataataaggaggttttcaagtggaagcaaagttacaagtaggtgtgttaggatttggaacggtaggtagcggtgttattcatattttagaagagcatcaagaaaaaattagtcaagtaactggctatcatatttctgtaaagaaagtgctagttcgtgacttagagaaaaatcgccgttatgaaacaaaaggttttgaactaaccaccaatccgtctgatgtactggatgatccagaaattgctgttgttgtcgaggttatgggcagcatcacaactgcgcgggaatacattttgcaggccttgaaagctggaaagcatgttgtaactgcgaataaggatttgattgcgctacacggcgacgaattggtggcagttgcacaagctaacaactgtgatttgttttatgaagcaagcgttgcaggtggaattccaattttacgtacaatcgtaaatagccttgcagctgataaaattcaaaaagtaatgggaatcgtcaacgggacgaccaatttcatgctaacaaaaatgacgacagagaaaaagtcatatgaagaagttttagcagaagcccaagcattaggttttgcagaatccgatccaacaaatgatgtggacggcattgatgcagcgagaaaaatggttattatgacaagacttgcatttggtatgaatgttaatttagataatgtagaaactagtggtatccgcggaatttctccagaagatattgaagtggcatatcaattaggctataaaattaaactagtaggtacagcagaagaaacaaatggaacagttaatgtaaatgtcggaccagtgttactaccaaaagcacatccgcttgcaggcgttaactatgaaaataatgctgtatttgtaacaggtgcagccgttggggaaaccatgttttatggtcccggagctggcgaattaccaacagcaaccagtgttgttagtgatttaattaccgtcgcaaaaaacagccgtctaggtacaaacggcaatgctttcaatagttataaacacgaaacgaaacatacgccgaaagaacaagttttctcaaaatattatctacgtctaacaatggatgataaaacaggaactttccttaagttaacacaaatttttgcagaagcaggcgtcggttttgataaaattttacaacaaccatatgatgattttacagcgacagttgttatcgtcacacactcaacaagtcaagcgcaattagaacaagctattactagagtgaaaaatgagccagaaatgcaaatgctcgcaaaatattccgttgtggagggttaattatgtataaaggtttactagaaaaatataaagaatatctaccagtaactgaaaaaacgccaatgatctcacttgcggaaggaaacacaccacttatcccattaccaaatttatcaaaagaacttggagtaactttatatggaaaatatgaagggttaaatccaactggttcttttaaagaccgcggaatggttatggctgtggctaaagcgaaagaagaaggtgcggaagcggttatttgtgcatcgactgggaatacttcagcagcggcggcggcatatgcaacacgtgccggattaaaagcatatattgttatcccagaaggtaaagttgctctaggaaaattagcgcaagcagtcatgtatggcgctgatattatctcgattcaaggtaattttgatgaagctttaaaatctgttcgtgaacttgctgaaacagaagcagtaacgcttgtaaactcagtaaatccttatcgtttagaaggccaaaaaacggctgcattcgaaatctgtgagcaattaggttctgctccagatgttcttgcaattccagtcggtaacgccggaaatatttctgcatactggaaaggttttaaagagtggaatgaggcaaacgcttctggacttccacggatgcatggatttgaagcagaaggagcggctgcaattgtccaagggaaaccgattgataacccggaaacaattgcaacagcgattcgtatcggaaatccagctagttgggagcttgcagaagcagctcgcgacgaatctggcggatacatccattctgtaacagatgatgaaattgttaatgcttataaaaaaatcgcagcgcaagatggagtcttcatcgagccaggttctgctgcatcattagctggagttattcaacatgtggcgaatggaacaattaaacaaggggaaaaagtcgtttgtgtctttactggaaatggcttaaaagacccagatacagcaatgagtgtacatgaaattccgatttcccatgtagatgatattgaagcaatgcgtacacatttacgttcaggagtgaaagcttaatgcgtattcgtgtcccggcaacaacggctaatcttgggcctggttttgattcgtgtggcttagctttgacgttatatcttactttagacattggcgaaaaagcggattcttggtatatcgaacataatattggcggtgggattccgcatgatgaaaccaatgtgattatcgaaactgccttaaacctagcgcctaatttaacaccgcaccatttagtgatgacatgtgatattccgcccgctcgtggacttggtagtagttcggcagcggttgttgcgggaattgaattagccaatacacttgctgaacttaacctttcaaaagaggaaaaagtccggatagctgctgaaatagaaggtcatcctgataatgtcgcgccagctgttcttggaaactgggtagttggagcaaaattagacggagaagatttctacgtacgtcatttatttcccgattgtgctttaattgcttttattccaaaagcagaactgttaacttcggaaagtcgcggcgttcttcctgaaacacttcctttcaaagaagcggtcaaagcaagtagtattgcgaacgttatgattgcagctatactacgcaatgatatgactcttgctggagaaatgatggaacgcgatttatggcatgaaaaataccgtagtaaattagtgccacatttaacacaaattcgagaagttgctaaaaacaatggtgcttatgctgcttgtttaagtggcgctggcccaactgtcttagtatttgctccgcgagacgttgcagatacgcttcaaacatctttacaaacacttgaaattgatgcagacgttcttcttcttgatgttgaaggaagcggtgcagaagtttttcgttaaaatcaagctatgtccacttgcggcatagcttttttcatgaagacaaaactatatgtcccaatttgtacggctctatgataaaataggaaaagagtttataaagttaaagggagcggtcttaatggcacagttatttttccgttatggttccatgaatagtgggaaaaccattgaaattctaaaagtcgcacataattatgaagaacaaaataaaacagtcgctatctttacttcaggtattgatgatagagaccaagtaggtttcatttcaagtcgaattggattgaaacgagaagcaacccctatttttagtgacacaaatatttttgaaatcgtagcaaatattaaaccgaaaccaaattgtgttcttttagatgaatcacaatttctagaaaaagaacatgtttttcaattagcaaaaatagtggatgacttaaatatcccagtaattgcttacggtctgaaaaatgattttagaaatgaattatttgaaggctcgaaatacctgctgctatacgcggataaattagaagaaatgaaaacaatttgctggttttgtgcaaaaaaagcaacgatggttctgcgcgttgatgacaaaggaaaaccagtttacacaggcgaacaaattatgattggcggcaatgaccactattaccctgtgtgtcgcaaatgccatgccaatccaccaataaaataaggtaaagaggtgttgaaatacaatgtatgatcgattacaggcggtggaagaccgttacgatgaactaaatgaattattaagcgatccagatgtagtatctgatccaaagcgactacgcgacctttccaaagaacagtcaggaatcacagcaacagtcgaaacctaccgtgaatacaaaaacgtgaatgaacaaattgatgaaacaagagaacttctaggagaaaaattagacgatgaaatgcgagaaatggcaaaagaagaattcgcggaacttcaaaaagaaaaagctgaactagaagaacgtctaaaactattactcgttccaaaagatcctaatgatgataaaaacgttattttagaaattcgcggggcagctggtggagatgaagcagctttatttgcaggcgatttattccggatgtatagcaagtacgctgaatctcgcggttggaaagtcgaaatcatggacgctaacccaactggtattggcggttacaaagaaattattgcgatgatgaacggcaatgatgctttttctcgcatgaaatatgaaaatggggctcaccgtgttcaacgtgttccagaaaccgaatctggtggccgaattcatacttccacagcgacagtagctattttgccagaagcggaagaagtggagattgagctacacgacaaagatattcgcacagatacatttgcttctactggtgcaggtggtcaaagtgtcaatacgacgatgtcagcagtccgactaacccatattccaaccgggattgttgtttcgatgcaagatgaacgttcccagttaaaaaacaaagataaagcgatgaaagtattgcgcgcacgtgtttacgataaatttgaacgtgaagctcgcgaagaatatgatgcaaaccgtaaatcggctgtaggaactggtgaccgttcagagcgaatccgtacttacaattatccgcaaaaccgcgtaaccgatcaccgtattggcttgactatccaaaaactagatcaaattatggaaggtaaactcgatgaaatcattgacgcgcttatcctagaagatcaaacaagtaaattggagcatttaaatgacgcaaattaatcaattgctaaaaaatgcagaagccatccttcttgaaaaaggattggatcaaaatgcagcggaaattttactagaaacgagaatgggacttacgcgttctgaactttggatggaaatgagccgcgaacttgaaccaaatcacgaaaaacagtttcaagaagactttgcaaggtatttagcgggagaaccggttcaatatattttgaagacagcgcctttttatggatatgattttttagtaacagaagatgtgctaattccacgacctgaaacagaggaacttgtagccacagcagaagcttttttgaaacaacatccgcttaggagtttgcttgatgtttgtactggaagcgggattattgccattgcgctaaaaaaagcatttccggatatgacagtgacagcttcggatatatcggccgcagcacttgcgattgctaaaaaaaattctttattactaaatgccgatgtgcgttttgtagaaactgatttactcgaatccttcaaacaaaataacgagcgatttgatatgattgttgctaatcctccatatatttctgaagccgaaaaagcagaaatgtcggattatgtcttaaaaaatgagccatcgattgctttatttgccgaaaatgatgggctagcaatttatgaacgttttgtggataacttaaaatatgtgctgaatccgtccttttgggtgggtgtggagataggttatacacaaggtgaacgagtaaaacaactctttgaaaaaagttatccacacgcaacggtccttatccacaaagatattaattcaaaagatcgttacgtaacatgctctaatatactggtatgaagacgtttctgtaaaagggacgtctttttttaatgaaagttatccacaaagctgtggataaaatgttgtgcaaaaaaatattttaatcaaatcttaataaagaaaatggcttttttacttagttttaagaattatccacatttcacaagaagttatccccattgacaaagttattatccacagtttggggataactcgtgttcaaaacttagcattttccaaaataaaaaacaatactgtaaaaatagcttagaaaacgttaaaatataatagaagttatgtaaaggggactggaaatcatgcaaaccatccattggaaaataaataagcaacaatcaaataatttaatctatcaaaaagcagcagaactacttcaaaatggagaatgtgtggcttttccgaccgaaactgtttatgggctgggagcagacgcgacaaatcaagctgccattcaaaaaatatacgcagcaaaagggcgtccgtcagataacccgttaatcgtccatattgctaagcgtgaacaaatggatcaatttatcgcgagttatcccccaaaagcgctccaactaatggaagcattttggccaggtccgctaacggttattctccctttaaaaaaagacagtctagcagctaacgtttctgctggcttatccacagtgggcgtccgcatgccggaacatccagtaagcctagaattaatagcaacagcgaatattcctatagcagccccgagcgccaatcgttccggaaaaccaagcccaaccacagccgaacatgtaatagaagatttagacggagaaattgccggtattattgacggcggtcctacgggtgttggtttagaatcaaccgtgatagattgctcacttgatgtacccattattttgcgtccaggtggcattactatagaacaaatcgagcaagttatcggaacagttgatttatcgaccaatagcacgacagaaacagaaaaaccaaaagcgccaggcatgaaatacactcattacgcgccaaaagcaccagtttatcttgtagaaggttctagccaattttggcaaagtgagattaataaagtgggaatcgcggggaaaaaactgggtattttagctacaaaagaattgacgagcaaattggctacaagtgcggtcattcaatcaaccggtagcattaaagcaatggatgagatagctactagtctttacaaaggcttacgggcttttgaccatgccgatgttgatattatttttgccgaagtctatccagaaacagaactcggagcagcgattatgaaccgattagaaaaagctgctgggaataggaggattagcgaatgaatattttatttgtctgtacgggaaatacttgccgaagtccattagccgaaaaaattttacaaaatatgcgacctgatttagaagttcgttcagcagggacgcgagcattagatggcgtcactatatcggaaaactcccgcgagatactgctgcaaatgaatttaccaggggaacatgccgcaaagaaaattacagaagccgatattgactgggctgacgaggtttatgtaatgaccaaaaatcaccaagctgagctaaaaagtatttttccggccgcgagtaacaaaatccaattgatttctgaagatgaaacagatattacagacccattcggaggaccaattgaacaatatgaaattacctattacgaactaaaaagtgcaatttccgaacgttttcaataagtgaagcgcttcactatcggaaattgcgtttttttgctccaaaatacttgcttttctacccgatttaagtaattattaaagataatacataacagttcacttgaaaaatttatcagaaaaggatggggtccacagatggtctatttacaaaagcaagataaggaagtttttgatgcaattaagttagaacttggtagacaacgcgcgaatatcgaattaatcgcatctgagaattttgttagtgagcaagtaatggaagcaatgggttctgtattaacgaataaatatgcagaaggttaccctggaaaacgttactacggcggatgtgaattcgtggatattgtggaagatttagcacgcgaccgggcgaagaaattatttggcgctgaatatgcgaatgttcaaccacactcaggcgctcaagcgaacatggcagtttatcatactgtgcttgaaccaggcgacacagtgcttggtatgaacctttcacatggtggccatttaacacatggtagtccagtgaactttagtggcgttttatacaattttgttgaatacggcgttcgtgaagatacgaaagaaattgactatgaaatcgttcgtgaagcagcattaaaacataaaccaaaaatgattgtagctggagcaagtgcttacccacgtaaaattgattttgctaaattccgtgaaattgctgatgaagttggcgcatacttaatggttgatatggcgcatattgctggtcttgttgcagcaggtttacatcaaaatccagttccttatgctgattttacaactacaaccactcataaaacccttcgtggacctcgtggcggaatgattttagcaaaagctgaatgggaacaaaaattaaataaatcgattttcccgggaattcaaggtggaccattaatgcacgtaatcgcagcgaaagcagtggcatttggtgaagcattacaacctgaattcactgcgtactgtgaacaaatcattcgcaactctaaaaaattagcagaaacacttcaagctaatgatgttgctgttttaacaggcggttcggataatcatttactattaattgatttaaaaccacttggcttaacaggaaaagctgctgaaaaagtattagatgaggttggtattaccgtgaataaaaataccattccatttgaaacagaaagcccatttgtaacgagcggtatccgtgtaggcgtggcggcagttacaacacgtggtttcgatgaagtagctattgaaaaagtgggagtacttatttctgaagtgctgcacaacttagaaaatgaagaagttttagcagatgtgaaagctcgtgtagctaatttaacaaatgaatatccgctttatccaagtttataaaataagtgagccggttttttctgaattttagagaaatccggtttttttcatgtatagcaaattaatccttgcacttgtgtcttgttctgatacaataagagaaggaaattttcaatatcaaaggagcgaactaatcgatggcaaacgtacacgtaattaatcaccctttagtacaacacaaattaacaattattcgagataaaaatacgggaacaaaagcattccgcgaacttgtagatgaagtcgctacattaatggcgtacgaaattacacgtgatatggaacttgaagacatccaagttgaaacaccactacaaacaacaactgcaaaaacacttacaggtaaaaaattaggtgtagtgccaattttaagagctggtcttggtatgcaagatggcattttaaaacttatccctgctgctaaagtaggtcatgtaggtctttaccgtgatcatgatacacttgaaccagtagaatattttgtaaaactaccttctgatgtggaagaacgtcttttcatcgttgtagacccaatgcttgcaactggtggatcagcaattatggctatcgattgcttgaaaaaacgcggcgctcgcaacatgaaattcatgtgtctagtagcagctcctgaaggcgttaaagctcttcaagaagcacatcctgatgtagaaatctatgtggctggcttagacgagaagctagacgaaaatggttatatccgtccaggcttaggagatgctggcgatagattattcggaactaaataattaacaatctcctcggtttagtgagataaggaattataaacagtgctgctttttggcagactggaaaattttttgtcgagctatttctgaggagtttttttataaggaggttcgcaattggctaaaatcaaagtaatgagcatctttggaacaagaccagaggcaatcaagatggcgccgctcgttttggcattagaaaaagaatcagaaacgtttgagtcaacggtagttattaccgcgcaacaccgtgaaatgttggatcaagtcttagaaatttttgatataaaacctgatattgacttagatataatgaaaaaaggacaaaccttagctgatataacttcacgcgtaatgaacggaattaatgatgttattgctaaggaaaatcctgatattgtcctagttcacggtgatacgactacaagttttgccgccggactagctactttttatcaacaaaaaaagcttggacatgtcgaagcgggacttagaacttggaataaatattcgccgttcccagaagaaatgaatcgtcaattaactggagtaatggcggatatgcatttttctccaacgaaacaagctaaagaaaacctgcttgcggaagggaaaaatccagctactatttttgtaacaggaaatactgccattgatgcccttaaaacaactgttcaagaggattatcatcatcctattttagagaatcttggtgataatcgcttaatactcatgactgctcaccggagagaaaatctgggagaacctatgcaaggtatgtttgaagcggttcgcgaaattgtcgagagtcgtgaggatgtggaacttgtatatccgatgcatttgaatccagctgttagggaaaaagcaatgagtattttaggtggtcatgatcgcattcatttgattgaaccactagatgctattgactttcataatttcttacgcaaatcttaccttgtttttactgattcaggtggcgtacaagaagaagcgccgggcatgggagtacctgttttagttttacgagacacaacagaacgcccagaaggcatcgaagcaggcacgttaaaactaattgggacgagtaaagaaaatctcataaaagaagcattagaattacttgataataaagaaagccatgataaaatggcgaaagcggccaatccatatggtgatggacttgctgcaaatagaattttagaagcaatcaaaagtcagtttaatggaacgaagcgaccagaagattttatcgtgtaaaacacagtggaaaactaggcgttaaaagtctagttttcctctttttttagaatgaaagcgccttattgttacagatatgttacacgctcgattttcactagttcttttatgttacatgtgataagatggtcaatgttattaatataagagcccaaaaaatagcttgtttttagcatagggatagaagactgcgctcagtattcactacaatcccgccgacgctagttttcgcgttgactgaattggaatttatacgggcactctatatcaaaatgcaactcatgataagtgagtccggctgttttttccgttctttttcttgggaaaagaactttcggtcgcgaaatttgcgaataatcgtatcgaattcttttaccaataatggtagaagtttttttatttgtacgaaagagagtttttgtcgccttttttgtgaaatatcacacgaacaggaggcaagttttccatcgattacggaggtgttgattgctgttaaatggacaaagataattctggcggagcaatctaagaaacgactagattttgaaatcaaaaaaatctcagaaataatgggctattcttttatggatagggtcaattgtggtactattagtaatagatgtacgcacaatttgtgaaagtgtattgacttttctcttttggctgttgtatgctaagaactgacacgctgataaggctttcatgtgtgtttgggattgggatgaattggggaaaatgtgcttgttttcacaaaccaaacttactccctgagatttcaaaatggtcatctggaaagaaaaatcttttgaaaaagaaaggattgcgccccgaatgttagaatcgctaattggcatgtatcatcgtcatcaaaagtatatggttctttttattgctgtttgtctttgtggatggtttttaaccccttacatacatattttcttgggacttaaattgggtttaatcgtcggctggtttaactactggttattaatgaggcgtacacaatcaatgactagagctttggctgaaaatcgttctttttatggtatgggaatgccatttagaatggggagcgtgttatttgctactattatagcgacgcaactgccggaatattttcatgtttatagcatggtaatcggacttgggcttgcatatgcaattatttttctggatttttttgtgtattccatgtaccgcagaaaaaagtttttaaaaagagaggggtgaacctaattggaagaggaatttccaacgataagcctattagggatcgactttaatctatctaatattttgatgattactgtgacttgtgtcatcgttcttctaatagccattatctgtaccagaaatctgcaacgccgacctaccggaaagcagaacttcattgaatgggttatggattttgtcagaggtattattaatagtaatatggattggaaaaccggtgggagattccatgtgcttggtattacgctactaatgtttattttcgtagctaatatgctaggactgccatttcaaatcgcgattaacgatgaagtatggtggcgttcacctacagcggatccaattgtcacattaacacttgcgataatggttcttggcttaacgcattactatggtattaaaatgcgtggtttcaagcactattttgttggtacttactttagtccaatgaaatttttattcccacttaaattagtagaagaatttgctaatactttaacgcttggtttacgtctttacggtaatattttcgccggcgaagttttgttaaccatcattgcaacacaacttgctcatatgaacatatttgtaggtgtgctagcaataattcctgcgttactatggcaaggattctcaattttcattggggcaattcaagcgtacattttcactatgctgaccatggtttacatgtcgcataaggtaagtgacgaacattaaactaactttcaaataagtcatttataaaagtaataaaaaataatatttagaaaaattaggaggataattatatgtctttaggtgttattgcagctgctattgctgttggattaggtgcattaggtgcgggtattggtaacggtcttatcgtatcaaaaactgtcgagggtgttgcgcgtcaaccagaagcgcgttctatgctacaaacaatcatgttcattggtatcggtcttgttgaggcccttcctatcatcgctgtagttattgcgttcatggttcttaataaataatttgaaggaagttgaggaaataaaacctcatctctttcgttttgaacgaataattcaagcgaatgtatagaaaggagtgaaactggcgtgttacaaccacatttagtaattggttccgcatttacgtttggtgatgcattcttcacactttttgctttcgcgattttgctagttttaatccgaatttatgcttggaaacctcttatgggagttatgaaagagcgtgaagagcatattggttctgaaattgatgcggctgaagaaagccgtgctcaagcagaacaactacttgccgaacaaaaaagtgttttacaacaagctcgtgttgaatctcaaacaatgattgagaatgcaaaacagcttggtgaaaaagaacgcgaagaaattgtcaaaactgctagacgtgaatcagaacgtataaaagaagaagcaaaagccgatattgcacgtgaaaaagaagatgctatttctgctcttcgtgaacaagtcggttccttatctgttcttattgcatcgaaagtcatcgaaaaaaatctggatgaaaaagaacaatctaaccttatccaagattatatcgaaaggctaggggatgacaaatgagtaaagatttggaagttgcaggtcgctatgccaatgcgctttttcaagtagctcaagataaagatttagtcgacgttttttcagaagaactaactgaattaaaagcggcattaaatgcaaataaagattttgtaaaactacttgaaaatcctactttcacgaccgagcaaaagaaaaatcttgccagcgctgtttttgaaaaaatcaatccgacattaagagattttatttatcttttaattgaccgtagcagagaagattatctttctgttattgcggacgtttaccaaaaacgcgtaaacgacttgcgcggagttgcggatgcagatgtttattctgttgtaccgctttctgaacaagaacttacggcgctttcgagagtatttgctgcgaaaatgaacaaaacaaaattaaacattcaaaatcacattgataaatcccttcttggtggagtcaaagtggttattggaacccgtatatatgatgacagtctaaaaacgaaattaaaggacatggaacggcaaattaaagcctagtttccgtttaacgaggggtgaaatcaatgagcattaaggctgaagagatcagctcaatcataaaacagcagattgaaaattatcaatctgaactaaaagtgagtgatgttggtacggttacctacattggtgacggtattgcgcgtgctcatggactcgataatgcaatggctggtgaattgttagagttctcaaatggtgtaatgggtatggcccaaaacttagaaacaaatgatgttggtatcattattctaggtccttacactgaaatccgtgaaggcgatgaagttcgtcgtaccggtaaaatcatggaagttcctgttggcgaagcgcttattgggcgtgtagttaactcattaggtcaacctgttgatggtttaggcccaattgaaacaactggaactcgtccgattgaagcagtagcacctggtgttatgcaacgtcaatcggtaaacgaaccactacaaacaggtattaaagcaattgatgcacttgttcctattggtcgtggtcaacgtgagttaatcattggtgaccgccaaactggtaaaacatctgtagcaattgatactattctaaaccaagctgaccaagacatgatttgtatttatgttgccatcggtcaaaaagaatctactgttcgtaatgccgtagaaacattacgtcatcacggcgcattagattacacaatcgtcgtaactgcagcagcatctcaaccagcgccacttctttatttggcaccttatgctggtgttgctatggctgaagaattcatgtacagcggtaaacacgttttagttgtatatgatgacttatccaaacaagcagctgcttatcgtgagctgtctctattacttcgtcgtcctccaggtcgtgaagcttatccaggggatgttttctacttacactcccgtttacttgaacgtgctgcaaaattaaatgatagcttaggtggcggatccattacggctcttccattcgtagaaacacaagccggagacatttccgcttatattcctacaaacgttatctcaattactgacggacaaatcttcttgcaatctgatttattcttctccggagtacgtccagcgatcaacgccgggctttctgtatcccgtgtaggtggatcagcgcaaattaaagcaatgaaaactgttgccggaacacttcgtctagatcttgccgcttaccgtgagctagaatccttctcacaattcggttctgacttggacgcagctactcgtgcgaaactagaacgtggtaaacgtacagtagaagttctaaaacaagatttgcacaaacctttgaaagttgaaaaacaagtattgattctttatgcacttgttcataaatatctggatgatgtaccagttcatgatgttctgcgttttgagtccgaaatgaatacatggtttgatcataatcacccagagcttttggaagaaattcgtacaacgaaaaaacttcctgacgaagcgaaacttgaagcagcattaaaagaatttaaaaatacatttgttccttctgaagaaaaataatttagactcggaataaattcaaaggtggtgaaaatctttggcatctttaatcgatattaaacaacgaataacttctacgcgtaaaacaagtcaaattacaaaagcaatgcaaatggtatcagcagcaaaactaggtcgtgcagaatcaaacgctcgttcatatgagccttacgtttctaaaattaaagacgtagtaacacatgttgctagcactggtaacagcagcgaccatccaatgcttgtatctagacctgttcaccgtactggttatatcgtacttacttctgatactggacttgcaggttcttacaacagttccgtaatcaaagaagtatttcaagaaattaataaaaagcatacgtcaagtgatgaatatgcaataatcactgtaggtagatctgctcgtgacttctttaaagcgcgtcaaatgaatgtggttttagaagtacaaggtattacagatcacccgatatttgcggaaattaaagatattgctagtaacacagttcaaatgtttgaagatggtgtttatgacgaggttttcatttattataatcaccatatcaattctatttctagtgaactgagaaaagagcaactactaccactgacggaatttcacgaaaaaggtaaagaaacggatgtagatttaactacttacgaatttgagccttccgaacaagaaatcctggaagtattattaccgcaatatgtggaaagcctaattttcggagcacttctggatgccaaagccgctgaacatgctgctcgtatgactgccatgagaagcgcgacagataatgcatccgatttaatcagtgacttatcactacaatataaccgtgctcgccaagctgcgatcacgcaagaaattaccgaaatcgtcggaggagcagccgcgctcgaatagaagtcggcgtttcttgtaacgtcccaataaatgggaaggtaagtgaggaggaataattgcatgtctaaaggacaagtaatccaagttatgggtccggttgtagacgttaaatttgaaggtggaaacttacctgaaatctacaacgccctagttattgaatataaatctgatgcagaagaagcaccaactagccaacttactttagaagtagccatccaattaggtgatgacgttgtgcgtacaatcgcaatggcatcaacagatggtgttcaaagaggtatggaagttattgatactgggagcccaattaccgttccagttggtacagtaactcttggtcgtgtatttaatgtattaggaaacaccatcgatttggacgaaccacttccaagcgatattaaacgtaataaaattcaccgcgaagcaccaactttcgatcaattagcaacaacaacagaaattcttgaaacaggaattaaagtagttgacttgctagctccatacttaaaaggtggtaaaatcggactgttcggtggtgccggtgtaggtaaaaccgttctaattcaagagcttatccataatatcgcacaagaacacggtggtatttcagtgttcgcaggcgttggagagcgtactcgtgaagggaacgacctttactttgaaatgaaagattctggtgttattgaaaaaacagcgatggtattcggtcaaatgaatgagccaccaggtgcgcgtatgcgtgtagccttaactggtttaacaattgctgaatatttccgtgatgaagagcaccaagatgtacttttattcattgataacattttccgtttcacacaagctggttcagaggtttcggctttactaggtcgtatgccatctgcggtaggttaccaaccaaccctagctactgaaatgggtcaattacaagaacgtattacatctactaacgttggatccgttacttctatccaagcgatttatgtgccagccgatgactatactgaccctgctccggctacaactttcgcccatttagatgcaacaactaacttggaacgtaaattaacggaacaaggtatttatccagcggtagatccacttgcttctacatcccgtgctctttctcctgatatcgtaggtgaagaacactatgaagtagcaacggaagtacaacgtttactacaaagatataaagaacttcaagacattatcgctatccttggtatggatgagttatctgatgaagataaacaatcggtttctcgtgcgcgtcgtgtacaattcttcttatctcaaaatttccacgttgcagaacaatttacaggccaaaaaggttcttatgtccctgttaaagaaacagttaaaggattcaaagacttattagccggaaaatacgaccatattcctgaagatgcattccgttcagttggacgtattgaggatgttcttgaaaaagcaaaagatatgggcgttgaagtctgataaaaacaggaggaaatacgtatgggttcattaaatgttagtattgttactccagacggccctgtttatgaaggcgttgctcaaatggttattgctagaacaaaagcaggtgaactcggtattttacctggccatgttccactagttgctccactcaaaatcgacatcgttcgtttaaaagtagagtctggtgaggaatgggtcgctgtaaatggtggctttatggaagtaaacggtgaagaagttaatattcttgcggatactgctgaacgcgaacaagatattgatattgatcgcgctgaaaaagcaaaacaacgtgcagaagaagaacttagccgtgcaaaagaacaaaaagtggatgaagtaatggctcgactagcactacaaagagcgatcaaccgaattcacgcgaaagaacacaattaataataatttagcttcctggtttttagccaggaagtttttttatataaccataagtgcattaactgttttttcctctctgtatttgttaaaatgagtagtagcgaaaaatgaggagcgaacacatgtataatattattatggaatcaccatatgtcatcatcatttcacatttactatttatcgttattactttttggtctttgcaagcaatcaactacgaaaaattcattaagaaaaatcatgtaacgcaagctagactactatttgtgattatttcgattgtgctcggttatacattaagtaactttttcttagactacttagcggcatctaagcagttaattaatttttttggctagaaaaagtactattgtagtaaaaatttaatataagcttataacaagtttaatattgggttaaaatcagttgatattttagggtgataagtggtagaattactaagatatgttttaattttaaaattcgataaatgatttagttattagtaacgcggaggggttctttttggaaaaaattattgtacgcggtggaaaacagttaaatggttctgtaaaaatggaaggtgccaaaaatgctgtattaccggtaatagctgctacattacttgcgagtaaaggtactagcgtattaaaaaatgtcccaaatttgtctgatgtattcacaattaatgaggtacttaaatatttaaatgctgatgtttcttttgtaaatgatgaagtaacagttgatgcaacaggagaaatcacttctgatgcaccttttgagtatgttcgaaaaatgcgtgcttctattgttgtcatgggaccactattagctcgtactggttcagctcgtgtagctttgccaggtggatgtgcaatcggctcaagaccagtagatttacatttaaaaggctttgaagcaatgggcgcaattgtaaaaatcgaaaatggttatattgaagctactgctgaaaaattagtaggggctaaagtatacttagatttcccaagtgttggagcaactcaaaatattatgatggctgctacattagctgaaggaacaacagtgattgagaatgttgctcgcgaacctgaaattgtagatttagcgaatttccttaaccaaatgggtgccagagttattggagcaggaactgaagtaattagaatcgaaggagttaaagaattaactgctactgaacattctattattcctgaccgtattgaagctggtacgtttatgattgctgcagcgattacaggaggaaatgttttaattgaagatgcagttcctgaacatattagttcattaatcgctaaattagaggaaatgggcgttcaaattattgaagaagaaaatggcattcgtgtcattggaccagataaattgaaagcagtggatgttaaaacaatgccacatcctggtttcccaactgatatgcaatcacaaatgatggttattcaaatgctaagtgaaggcacaagcattatgacagaaactgtttttgaaaatcgcttcatgcacgttgaagaaatgcgtcgaatgaatgcagatatgaaaattgaaggacattctgttattatttccggtccagcaaaactacaaggagctgaagttgcggcgactgatttacgtgcagcagcagcacttattcttgcaggtcttgttgcggatggttatacacaagtaacggaacttaaatacttagaccgtggctataataatttccacggaaaacttcaagcgcttggtgcagatgtagaacgtgtagatgattctaaaatcgatgtaacgaatttagcttctctattctaaaattaaatttgttaaaaccgtatcttttggtacggttttttttattatcgtgaaaaaaaccacgttgtcatgaaatatacatttcagcgtaacgtaaattatgctataattcagaatgagatgtaaaattaggtgtacaccacgaaaggagttaaaatgtaaatggcaaaagatgttggtatcgatttaggtacagctaatgtattaattcatgttaaaggaagaggaatcgttgttaatgaaccttcagttgtcgctataaacaataagactggacaagttctagcagttggaacagaagctagagatatggttggtagaactccaggggatattacagcaatcaaacctatgaaagatggggttattgctgattttgatattgttcaagaaatgctacgtttctttatacaaaagttgaacctgaaaacctttttttcgcgtcctcgcattttaatttgttgcccaacgaatattacttctgttgagcaaaaagcaattagagaagttgctgaaaaaagtggtggaaagcaagtgttcctagaagaagaacctaaagttgcggctattggtgctggcatggaaatctttgagccttctggtaatatgattattgacatcggtggtggaactgcggatgtagccgtattatctatgggcgacatcgtaacaagccaatccgtaaaagtggccggcaataaatgggacgctgatatcttaaattatgttaaaagaaagtataacgtacttattggtgaaagaactgctgaaaatattaaagtaactattggaactgcttcccgaggtactaaagaagaaactatggagattcgcggtagagacttagtaagtggcttacctaagactatctccattactagttctgaagtagaagaagctattcatgattcattgaacttaatggttttagcagctcgacaagttttagagcaaacacctccagaactttcagcagatattattgatagaggaattattatgactggtggcggttcattattacatggtttagacgaattaatgtctgaacaattaaaagttccggttctaattactgaaaatcctttagatgttgtagctctcggtactggcattttgcttgaatcactaacaaataaaaaacgtggtcgtatctaaatttgaatttgggggatttatatgttagatattaagaaaatcaaagaaattttacctcatcgttatccatttttattagtggatagagttatttctgttgaagaaggaaaaaaagtaactgctataaagaatgtaacagctaatgaagaattctttaatggccattttccggagtatcctgtaatgccgggtgtcctaattgtagaagcacttgctcaaacaagtgggattgcaatgatgcaaagtgaagctaataaaggcaaaattggtttgtttgcgggaattgatggatgtcgctttaaacgtcaagttgtgccaggtgatcaactcttacttgaagcagaaatcactcgaatgagaggcgctattgccaaggccaaagttaaggctacagtagaaggcgatttggtttgtgaagcggaaattatgttcgctttatcagatttaccacaatagaaataatgagcactgaagtccaaaatggattttggtgcttttttgatgttctcagaatagcatgtgctaaaaaaagttgcaatttagtaaaatagtgttttgcattcattatctctctagaaaagtattattttcttctaacagaaaacggtttttttgtttctttaacccccatgaaaatggaactttagctattttacaaagaaatttttatcaaatataatcgctttacaccaaaagaaagaggcgattatatgattaatcaagtaactttagtaggacgtttaacaaaagagccagaactgaaatggaccacagaagatagggcagttttgaatttgacaatagctttaaatcgttttagaaagaataagagagtcgacaatgatgcagattttattcaatgcgttatttggggaaagcgagcagaagcaactgctgaattttgtagtaaaggacaattagtaggtgtaatcggagaactacaatctagacaatatttgaataaagaggaacagaaagtctatattactgaggtgttagttcaccaaattaggtatctatcaagtagaggtaaaggcgaaaatgtagttaatatctctcatgaagaagatgaatgatgtaatactttgttataaaaagctagatttaacttataatttataaaaatttggttgaaatagcgattaaaagcgttgattttaggagttatttgtaatggaaaaattttccaattctatcttttaaatataaatagtttattttatgaagtatttaattgggatataaaagaggcgtgaactataacggcgagttatgttgaaagaatttgagaaccaattgaaggtgtaaacaataaaaatcagacaataatggtaatttacaaatattgcaggattctcggggctcttcaggcgcctgtcatacatgcttaattttttagtaaccaagtccaaagtttcatgtggtacgattgttctcgaaagtaatcaaggagggaattaattacatgaagaaaacagtagtagccattgcggctggtttaattattgcaggatctggttcaactcaagcttttgcggctgagtataaagttcaagacggtgactcactttggaaaatctcaaatgaaaataatatctctataaaacaattgaaagaagataacaacttaagctcaaacttaatttttccaaaccaaacgttacaagtaaatagtggcgagaaaaaagctgctactagtaacggtacgaaatatacagttgtagctggtgacacactaggacatattgcattagataacggtgtgacagttaaccaattaaaagaatggaataatctttcatctgatttaatcatagttggtcaaaaattgtctgtaggtgaaaatgctaaagctagtgaaagcacaccttctgaaaacaacaaatcagaaagtaatgctacagaacaaccagcacagcaaccaaaagaagaaaaatcaacacaaacaactcaaaaatcaacaacatctaatgaatcgtcaaataactcttcgtcagctcaaggaaatgtttcaaaagagctaacagttacagcaactgcttatagtaaagctgaaccaggaatgagccatatgacagcaacaggaatcgatttaaacgataattcacgtgttattgcagttgatccatctgttattcctctaggttcaaaagtgtatgttgaaggatacggagaagcaattgcagccgatactggtggcgcaattaaaggtaataaaattgatgtacatttaaactcagtacaagaagttaataactggggtgtaaaacaagttaaagtacaaattttagattaatctactccatatcgaaaagctgcaaatggcatatgctatttgcagctttttttgattaaaaataggaagaggctcttttttatgataaacttatacataataaagttttttaggagattcaaatgaaaaagcaggaaatttcaattttaaatatacctttttataatacaacccaagctgaatttattgaggaattacataatgttgctcaaaatggggaaagacgttttgttgtaactgctaatcctgaaattgtaatgcatgctcggactgataaagagtttgaggggattttacgtcaagctgattatattgttccggatggtattggtattatcatggcttctgaaaaacttgggaatccgctaaaagaacgagttactggttatgatacaatgattggtttattagaaaagccgctacgttgttattttttaggggcgaaaccagaagttagtcaaggcgtggagagtaaagtgaacgaaaaatacccgcaagcaattgtttgtggtgttcatcatggttattttgatgcgcttgagagtgaggcgattgctaaagaaataatcgctgctgaaccggatgttatttttgttgctctaggttcacctgctcaagaaaaatggattttatctcagatggctaatttttccaaaggtatttttattggtgttggtgggagttttgatgtattaactgataatgtaaagcgagcgcctaaaatttggataaagctgagacttgaatgggtatacagattgctagcgaatccttctagatggagacgtttttttgcaatacctcaatttatgcttgttatccgaaaagagcgtaaacgtttgaaaaagggtgagtagaatgtattttcagaaggcaaggttaattcatgctgaactaccgcttttggcgccgtttaaaactagttatggcgaattgaaaagcaaagatttttatattattgaattaataaatgaagaaggaatccacggatatggtgaattagaagcatttccgttaccagattacactgaagagacacttagttctgctattctaatcattaaggagcagctactacctctcctcgctcaaagaaagattcgtaagccggaagaaatacaggagttattcagttggattcaaggtaatgagatggcaaaggcggctgttgaactcgctgtttgggatgcttttgctaaaatggaaaaaagatcgttagctaaaatgattggggctactaaagaatctatcaaagttggagtcagtattggtttacaacagaatgtggaaactttacttcaattagttaatcaatacgtcgatcagggctatgaacgagtgaaactaaaaatcgcaccaaacaaagatattcaatttgttgaagctgttcgtaaaagttttccaaaactaagcttgatggcagacgcgaattcagcgtataatagagaagatttcttgttattaaaagaactagatcaatatgatttagaaatgattgagcaaccgtttggaactaaagattttgtggatcatgcttggttgcaaaaacaattaaaaacacgaatttgtttagatgagaatattagatccgtaaaagacgtagagcaagcgcatagcattggtagttgtcgggctattaatttgaagctggcacgtgttggaggtatgtcatctgcccttaaaatagcagagtactgcgcgttaaatgaaatactagtttggtgtgggggaatgcttgaagctggtgtcggcagagctcataacattgcactagcagcgagaaacgagtttgtttttccaggggatatatctgcctcgaatcgtttctttgcagaggatattgtaacgcctgcttttgaattaaatcaaggtagactcaaagtgccaacgaacgaaggcattggtgtaacgctagatttaaaagtattaaaaaaatacactaaatcaacagaagaaattttgctaaataaaggatggagctgaaaaaatattgctaatatggagtatattgattagctttgctgttggtattatcatggtgccaataattagaaagtttgcattcagaatcaatgcggttgacacgccgcgtgaaagacataaacatacaaaaacaacagccacactaggtggattagctatttttataagtttttcagtggggatgttgttagtaccaatcgataaatcagggtttgttccaatttattttggtgctctaatcattattgcaacagggtttattgatgatatatttgatttatctcctaaatggaaaatggtagggcagattttagctgctctttgtgtcactgtttggggcgaaataacaattaattttattaatattcctttctacggggaattggactttggatattttgcgataccattatctattgtttggattgtggccatagtcaatgcacttaatttgatagatgggttagatgggcttgctggtgggatttctattattgctttaatgacaattgcaggtatggctctacttcttaaagatgcatttgttgctccagtcgcacttattcttgccgcatcagttgctgcatttttaatttacaactttccgcctgcaagtatttttatgggagacaccggagctttatttttaggctatatgatagctgttttatcgcttatgggctttaagaacgtaacttttatttctttgttagtgccacttattattttaggtgttcctttatcagatacattttttgctatcgtacggaggttgaaagagcgcatgcctatatcgtctgcggatcgctcgcacatccatcatagattaatggctcttggttttacagaaaaacaaacagtgttgttaatttactgcatggcactactattctctataactggttttgtattttctttttctacaacttggggagcattactattactcttattactaattttttgtattgaaattattgttgaatttatcggtttaattggtgaagattatcgaccaatcttaaatttacttcaaaaaatacatcgaaaacgcaaataaaaaaaccaacaactaattattagttgttggttttttgttagtttgatgcagtggaactttcatctgaataagctgctgcgccagggaatggttgtttaattcctaactcactagcaaattcattcgagatactttgaacggaggattcattcagtttgtaataataaatgccgttcattggattgctatcacctttaaggttgagtgatttaatatcaattttattagacattccaaattttgcgattgaaagcatttggttgaaagttaggttggttttcatgttgtcgccaactacttcaataatatcagagtatttgctaacggaagaaacagaagtcgcttcactaacaatagatttaataataagttgttgtcgtttaccacgttcaatatcactatcaatatgtcttgtacgtgcaagggctagggcttgttcagcattaagatgttgcggcccttttttaagcgtaattgcgttttggttatcttttgaatcttgttcagtaaagtttactggaacgtctacatcaataccatctaatgcatcaataattttgaggaaagcatcaaagtcaaatcgaacatagtagtcgattgggattttgaattcttcttctactgttttcatggtaagttctggaccaccatatgcatgagctgcattgattttcgtgtatttattaatctcttttgcagaatcttcaatgtgtacataagagtcgcggggaatacttgtcatttctacgcgtgcatcctttacattaaatgtagctaggataagcgagtcactacgagggtttccgttagatgctcttgtagtacttgtatcaacgccaataattaaaatagaaaaactatcttttataggttcaacatcatttgtgcgaagtgtggaagctttcccgttcctcacgttatcgaaagagttgtctgctgcgagtttcgtcttgctaaaaaggtaagtgccatatccgacacctgcaagtactaaacacatcacaggaattagaatccagaataaaatttttcttctacgcttgtatttcttgctgcttcttcggctatcatcagtgcctttactcatatattaattctccttatagtcacttttctaagttttattgtatcatttgttgaactaaagaatgttacgtgttatttacggtttctttaatttttcaactttgatgttattatacagaatttcattgaaaaaaaatacaaaaaagatgatatctttcaaaaatgtaatatttgcctaattaagtattaattggtaattactgatttcacaaattttcccagagtgtaaatctagttcttgccccgttgaaataagttcaaaaccaagcttagtaagtagttttatagaagctatattttcagggaggactttggctgtaattgttttgtatgggaggtgagctttagttgtatttaaaaaggttgttaaaatctcgaacataagcccttgacgccaatgacttttggctaattcataaccgatctcgattgtttggttgtttttgttaatatcgtttattcccagagagccgattgcttttaaagaattatccattgtaaaaatagtatacctacaagcatttggttcgttttcgatggcttgaatcatttcctccgcttgaaggatggtagaaaatttttcgatattcataaactgagcaacgtcattgtcagaccaaatatcaaataaggtagttgcatctgcaaaagaagtttttctcaaaatagttcgttccgtagaaatagtggtgggtaaatgtaaaaatatgtttgtggacattctaagtaacatccttttctctatatttttgtgggccttctttgtaagtaacttggccatttgaaacctctgttatccaagtggaaaaagttgaaagatcctcattatcaacaaatacttgaagtacgactttttctgtgaattctttatgaacgatttgataatttttttgctcaagtgcattctctattttgcctaaaagtggataggcaaaagagcactcaataatagtagctaatttgcattcgattataccgatagtttggattgcttcactgacagcaccaccatatgcacggacaaggccccctgcgccgagcttagttcctccgaaatagcgagtaacaaccacaacaacattttttaaagctttcttttttaaaacttctaacataggaacccctgctgttccacttggttcaccatcgtcatgtgctttttgaaattggtcattttctcctataatataggcagagcaattatgagtagcatcacggtgctcttttttgattgtttgtatgaatgtctgtgcttcggattctgtttttattcgcttaatatggcaaataaagcgagatttttcaattattatttcatgttttccatcgctacgaatggttaaataatgatccaacataaggaacctccataagttgatacattcagtctgcttttattttatccgaaagcaaagcgattgtatagatatttttctaagtgcagcgggtgaagtggtggcaaattcgtgttataataaaaactactattactttagactggttttcgattgcattttataggcatatagaagtaattttctaaaactttgctgtataattgagctacagtttgtaatgaaaataggttagtttgagtaaatagtacttaaaagagaaaagtttatttgccaattttatggcagggattataaggttaagcgttttgctacttaaaaaggatgatgttttcgattgcaaagtggcttggtgaaattagataagtgaaggaggagtagtcattatggcactcaaaatcatgattgtagatgatcatcagttgtttcgcgaaggtatcaagcgaattttagagttggaagattcttttgaagtcgtagcggaagctgaaaatggtaagaatatcgtagcaaaagttcgcgaatataaaccagacatcgttttaatggatattaatatgccaactgttaatgggttagacgcaacagaaatgttagtacgtcaattccctagtatcaaagttatcgtattgactattcacgatacagatgagtacgtaacagaggcacttagagcaggagcagtaggttatttattaaaagaaatggatgcacatgaacttgtagaagctgttaaaatagtagataatggaggcgcgtatattcatccgcgtgtagcgattaaattaattcgcgaatatcgacatttagcaagcacgaatacttcgcaaggggtttatggttaccagcaacccgaagtgaaaatgcctttgcatattttaacgcatagagagtgtgaagtattacagcttcttaccgatggaaaaagtaaccgcggaattggggaaacgcttttcattagtgaaaaaacagtgaaaaatcatgtcagcagtattttacaaaaaatgaaagtgaatgatagaactcaagcggtggtaacggcaattaagcacggctgggtttatattcgctaaagaaatttcagggggactatatgaacgaaaaaatagcagtggttactgacagcaccacttatttgccagatgaagtgaaagagcagctacgaattaatgtcgtaccactttccgtaataattgatggaaaatcttatcgtgaaggagaagaactttctacggctgatttttacaaaaaagtaaaagaagcagaaaattttccaacttcttcgcaacctgcccctggtgaatttattcaattgtttgagaaactaaaagaacaaggttttgatacagtaattagtattcatctatccagcggcatcagcgggactttccaaaacgcagcttctgcaggtgaactaattgatggcttgaatgtagttgcttatgattcagagctttcatgtatggcgcaagggatgtttgctgttaaagcggctgaaatggctttagcaaatgaacctttagaacgaattatttccgaattagataagattaaaaaggcgcaagatgcatattttatggtagatgatttaaataacctgcaacgcggtggtcgcttaaacggggcacaagcgcttgtcggtagtttgcttcaaattaaaccaatccttcattttaatgataagcaaattgttctttttgaaaaagttagaactcaaaaaaaggcattaaaacggattgaagatattcttgaagtagctatcaaaaataaaaatgcagaaaaagcctacgttatccatggaaatgatccggaaaaaggagaaacatggcgcaaacatttagaatccaagtttccagaagtggagttcgagttgagctattttggcccagttatcggcacacatttaggtgaaggcgcactgggattaacctggtcaataaaataatagaatctctagctttttagctagagatttttttatttaggctaaagttgtattttcgccaatttcacctattgaaaatggttattttgcctttagcgaaaatagtattttatggtcaaattgaggctggaaaataagaaattaacttctgcaaagaaatataaaaaagtgtataacttaggagaggtgaaaagtgatggatatttttcctggaaggttatatctaaagaaggaagtcgaaacagttgagggactacaggaaattcttgctatttcagctaatcgttgttttcgttgtggaaatacaaatccatttttattcggcaaaatgacatgtgcttcttgtgatagggaggattgtttgtactgcagaaactgtatagttatggggcgggtgaacagctgccagaagttatactatcaaaaagcagacattctgccggaaagaatagaatcttgtttgggctgggaaggaactttatcaccaggacaaaaaaaggccgcaagtgcagttgtttcaagtattaagcagaaagttgatatgcttttatgggcagtcgctgggtctggtaaaacagaaatgatgtttgaaggaatggatttagcattaaagcaaggttttagaatttgtatagcttctccgagggttgatgtatgtttagaattatatccgcgtttgcaagctgttttcaaagagatagatatagtttgcttgtacggagattccaaagacaaataccaaggcgaacaatttgtggttgctacaacacatcaattaatccgtttttatgatacatttcaagttatttttatagatgaagtagatgcttttccatatgcaaaagatccttttttagaatacgcagttagaaaggctagaactaaagtaggttcaacaattataatcacagcaactccagagaaaaagtggcaacaagaatgcgcgaccggtaaacggaactttgtaaaaatccctgcccgctaccatagaaagcagctacctgttcctagaacttgctggattggtccatggaagaaaaatttagctcaaggaaaaataacccttaagttaattaattggataaaaaaagcagaacttaaaaatcaaccagtattaatcttctttccagaaattgaagcaatgaatcaatttgctgaagcgctcgtaaattatgattttactcgcccagtgaccgttcattcggcagatcagttacgcaaagaaaaagttgagtggctacgtgaaggcaaaatcaagctactacttacgacaactatattagaaagaggggtcacttttaaagatgttcaagtagctgtttttggaagtgaggggaggatttttacagaagctgcattagtgcaaatagctgggcgtgcgggaaggaaattaactcatccaactggcgatgtttgtttttttcattatggcaagactacagaaatgaatcgggctattacgcatattaaaaaaatgaatcaattaggttttaaagaaggattattagatgattaactgtttactttgtttacaacctgttaaacaatcagctagttgggaacttagttggtttcttagcgaggaagttttgtgttgttccgattgtatagcgggctttgaaaaattaactggaccgctttgtaatatgtgtagcagggaatcgtctgatgaattttgtaaagattgccaaggtagagagttttttctagatagtaatcgatctttgtaccaatataatgattttgccaaagaatatatgaaaaaatttaagtttcaaggtgattatatcatcggagctatttttcaaaaggaactaaaaaaatacttcgccgcgaacaaaacgactattgtcccaatcccggtaagtgaagtccgcaaattagagcgaggatttaatcaaacaacagcaatactgaaccaatctaatcttcactatgaggaacttttagcaaaaaaacactctgaaaaacaatctaagaaaacaaagcgagaacgattagaaacagagcaagtattttatgtagatgaagagattggaagcagtgaaaaggaaataattttatttgatgatatatacactacaggtagtactcttaacttagcggcgcaagcgttaaaagaatcaggggtgaaaaaggtgagctccttaaccatatttagatagttgagatttatcgctgaaagaggtttgcgaaaggctttttagggaataaaatactaaataaagataagtagataaacgcttctttactctttgtgcaaatgtttgcaaaagctatcgttttcacgtagactaagggtaagaagaatactcttctttatcgttattttgttttatttcaaaggaggaattgctatgcttaagtacaacattcgtggtgaaaatattgaagtaacggaaccgattcgagattacgtagaaaagaaaatcgataaactagaacgatattttacagaaactccagacgctaacgttcatgttaatttaaaagtatattccgataaaaatgcgaaggttgaagtgaccattcctctcccaaatcttgtgctacgtgcagaagaaactagtggagatttatatgctagcatcgacttgattgtggataaattagagcgtcaaatccgtaaacataaaacaaaagtaaatcgtaaattccgtgataaaggtgcagaaagagattattttgcatattcggatgttaacggcagcacaccaccagaagaaaatgaaggagattttgatcttgaaattgtaagaacaaaacaattttctttaaaacctatggacagtgaagaagctgttttacaaatgaacttgctaggacatagtttctacgtatatactgatgctgaaacaaatggaactaacattgtgtattcacgtaaagacggtaaatatggattaattgaaactaattaatagtacaaagataatgagcatgggggccaaaattttggcccccatttttattaggaatgaagaatctatgacgtttttgcatttttatttgttaaaaagagataaccagttgtatattttatctaataagtgatagaattagtgtgtatattttaagagaagataattcctgaaagttatcatagatgaaactgcgcgacgacagcgaaaacagtagaggagaatttaaatggctggactattgaagaagatttttgaatcaggaaaaaaagatgttaaatatttggagagaaaagcagatgaaattattgctttagcagacgaaactgcagctctttcagatgaagctctacgcgagaaaacagtagagtttaaagaacgagttcaaaaaggtgaaacgctagacgacttattggtagaagcttttgctgttgccagagaaggtgctaagcgtgccctaggactgtatccatttaaagttcaattaatgggtggtatcgttcttcacgaaggtaatattgcagaaatgaaaactggtgaaggtaaaacattaacagcgacattaccagtttatttaaatgcgctttctggtgaaggtgtacatgtagttacggtcaatgaatatttggctcaccgtgacgcagaagaaatgggtgttttatataatttcctaggtctttctgtagggcttaacttaaatgctttatctagcacagaaaaacgagaagcttatgcatgtgatattacgtatagtacaaataatgaattaggatttgactacttacgtgataacatggtggtttacaaagaagaaatggtacaacgtccattagcgtttgccgttattgatgaagtcgattctattttggtcgatgaagctagaacacctttaatcatttctggtgaagctgaaaaatccactatcttatacgttcgtgctaatacattcgtacgaactttgacagaagaggaagattatacagttgatattaaaactaaatctgtccaattaaccgaagatggtatgacaaaaggggaaaactactttgatgtagaaaacctttttgatttagaaaatacggtgattttacatcatattgctcaagcgcttaaagcaaactacacgatgagtttagatgtagattacgtagttcaagatgatgaagttctcattgttgaccaatttacaggtcgtattatgaaagggcgtcgtttcagtgagggcttacaccaagcgcttgaagcaaaagaaggcgttactattcaaaatgaatctaaaacaatggcaactattacattccaaaactatttccgtatgtacaaaaaacttgctggtatgaccggtactgcgaaaacggaagaagaagaattccgtgatatttataatatgcgtgttattgaaattccaacaaacaaagtaattattcgtgatgatcgtccagatttaatttttacaacgattgaagcgaaatttaatgcagtagtagaagatattgctgaccgtcatgcaaaaggacaacctgttcttgttggtactgttgcgattgaaacatcagagcttatttcgagcaaattaaaacgcaaaggaattaagcacgatgtcttaaatgccaaacaacatgaacgtgaagcggatattattaaaaacgctggtgaacgtggtgcagtaacaatcgcaaccaatatggctggtcgtggtacggatattaaacttggtgaaggtactattgatgctggtggtctagctgtaattggtacagagcgccatgaatcacgtcgtattgataaccaattacgtggtcgttctggtcgtcaaggggatccaggtgtaacacaattctatctttctatggaagatgaactgatgcgccgttttggctctgataacatgaagagcatgatggaacgttttggtatggctgaagatgcaatccaaagtaaaatggtgagtcgtgcggttgaatcagcccaaagacgtgtggaaggaaataactttgattcacggaaacaagttttacaatatgatgatgtacttcgccaacaacgggaagttatttataaacaacgctatgaagtaattaatgcagaaaacagtcttcgcgaaatcattgaacaaatgattcagcgtacagtgaatttcattgtttctagtaatgcatcaagccatgaaccagaagaagcatggaatttacaaggtattatcgattatgtcgatgctaacttacttccagaaggtacaattacgctagaagatttacaaaacagaacaagcgaagatattcaaaaccttattttggacaagataaaagcggcatatgatgaaaaagaaacattgttgcctcctgaagaatttaatgagtttgaaaaagtagtattgcttcgtgttgttgatacgaaatgggttgatcatattgatgcaatggatcatttacgtgatggtattcatctacgtgcttatggtcaaattgatccgcttcgtgagtatcaatcagaaggtttcgagatgtttgaagcaatggtatcatccattgatgaagacgtggctcgttatatcatgaaagcagaaattcgccaaaaccttgagcgcgaacaagtagctaaaggtgaagcaatcaatcctgctgaaggaaaaccagaagcgaaacgccaacctgttcgtaaagaccaacatattggacgtaatgatccttgtccttgtggtagcggcaaaaaatataaaaattgtcatggtaaagaagcatagattgaaacaactaaaaaagcgcctgcaagatggcgctttttgctatgaaagtttgtaagtaaatttaaaaaaggtggaattagaatggaattagcagaaattcgtaatgaactagaaaaaacagcgcagcaaatcaaagactttagggggtctctttgacttagacagcatggaagttcgaattgctgagttagaagaccagatgttggatccgaatttttggaacgaccaacaagcggctcaaaaagtaattaatgaatcaaatggatacaaagaaacgtatcaagcttttcatgcgcttgaagaagaacaagaaagcatggaaatcagtttagaactactaaaagaagaagcagatgaagatttacaagcagaattagaaaaagatattaaagcatatgtggcgacgataagtgaatttgaacttaagttaatgttaagtgatccatatgataaaaataatgctattttagaattgcatccaggtgctggtggaacagaatcacaagactggggctcaatgttattacgcatgtatcaacgttggtctgagaaaaaaggttttaaagtcgaaatgctcgattatcaagcgggtgatgaagcgggtattaaaagcgttacattactcatcaaagggcacaatgcatacggctatttgaaagcagaaaaaggtgtgcatcgtttagttcgtatctctccattcgattcatcaggtagacgtcatacatcttttgtttcagtggatgttatgccagaattagatgatgaaattgaaatcgaagtacgtacagaagatttgaaaattgatacgtatcgtgcaactggtgctggcggacagcatattaatacaaccgattcagcagttcggatgacacatattccatccgggattgtagtaacctgccaatcagaacgttcgcagcttaaaaaccgtgaacaagcaatgaaaatgttgaaaacaaaactatatcaaaaagaacaagaagaaaaagaacgcgagctagcagaaattcgtggtgagcaaaaagaaattggttggggaagccaaattcgttcgtatgttttccacccttactccatggtgaaagaccatcgtacaaattacgaaaccggtaatattcaagcggtaatggatggagatttagacgactttatcaatgcatatttgcgttctaggattggataagaacgatgacaaataaaaggaaaaagcaacctttatccccaatggtttctaaattaattgagtatttatatgttattattggtgctgctttaattgcactagccttcaatgttttactcttgcctaatcatgttgcttctggcggtgtgagtgggataagtacgattattaactatttaactggttggaatccagcatttatccagtgggcttttaatatccctttatttcttgctggattattcttcttagggtatcaatttggtttgaaaacttttgttggtacaatgcttttacctttctttgtgtatttaacacaaggattagcaccatggacgcatgaaccgctagtcgctgcattatttgggggcgtgctagtaggaatgggacttggaattgtttttcgtggcaaggcctcaactggtggtacggacgtggctgcccaaattttgcataaatattctcatttaacattggggatatgtgtagctttaattgatggctttgtagttatctcggcaatgtttgtttttgatattgaatctggactttatgcacttattggtctttttgcaactagtaaaacaattgatttagtgcaagtggggcttaatcaatccaaaacagtgtttattatttcagagaatcaagaagctatcagacaagcaatcctctttaaaattgatcgtggtattactcgcctttcagcaaagggcggctatactgaagatgacaagcaaatcttactttgtgttattgctcaaagtgagttttctagactaaaagaagtaataaaagaaattgacccagaagcttttgtcgttgtaatgagcgcaagtgaagtaatgggggaaggtttcacgtcataaaaggcaacattttctcctctttttaggggagaaatgttgcctttttcaagttttttacctccctatttaacaatttgatgacaggaacctttagcgtaatagtagacttgaagcagttttgttctaattggtctattccggtagcgataactgtaatgttttttaatctacctgtaatgttatttagggtaaaaacaagttacaatgttagcagtagaaaagaccaacacaggtgcttttttattttgtctaagaaaataagaaccacggataacttttcaaaagaatttaaaatcaaaaattgtgtttcctattacaataatcgagatattgtcataccctgaaatataattgtaatgcaattaacctatagatgaaaaactgtcatggtataattaagcttatgttgtgagtttaaattcgagccaacaaacagttcatcttcatggttaccatgcattacctaaaatgtaactcagtagaaaggcatagtaaggtgataaaatgatattaatggaagatgtttataagaaataccccaatggcataactgccgctaatggactcaatattaacattggtgaaggggaatttgtttatgtagtaggcccgagtggtgctggtaaatcaacctttattaaaatgatttacagagaagaacgagcgacgaaaggcaaaatcatcgtagacaaatttgatttgattaatatgaaaaatcgtgaaatcccatatttacgtagaaacgtaggcgtggtattccaagattacaaattacttcaaagcaaaactgtttatgaaaacattgcttatgcgatggaagtggttgaaactgagccaaccgtaattaaagaacgtgttatggaagtgctagatttagtcaacctcaagcataaagtaagaatgttgccggatgaactttccggtggtgagcagcagcggatatccattgcccgctcgattgccaatatgcctaaagtattaatagcagatgagccgaccggtaacctagatcctgatacttcatgggaaatcatgaatatccttgaagaaataagcaatcgcggaacaaccattgtaatggcaacccacaacaaagaaattgttaacacgttgaaacaccgggtagtagctatcgagaatggaagaattgttcgagatgagcagcaaggagaatatggctatgaaatttaggactgtaggaagacatataagagaaagttttaagagcctttaccggaatggttggatgacctttgcagcagcaagtgcagtaacagtaacacttatcttagtcagcgtgttttttgcaatattgatcaacatgaacaagcttgcaacagatgtagaaaacaatgtacaaattaacgtacatatttctctaagcgcagacaagaaacagcagcaagaacttgagaaaaacattgagaagattaatggagttgatagtgtcagtttttcttccaaggatgatgagttgaagaaattagttggcgcgtacggcaaaaacttcgaattgtttaaacaagataatccactatacgatgtgttcgttgtagaggctaaagagccaacacaaacgaaggcgattgctcaaaaagtagaaaaattacagtacgtagataatgtagaatatggtgagaaaacagtcgacaaattgtttgataccttaaaatggggacgatatgctggtattatcctaagcattggattattactaacagcgatgttcttaatatcaaacacaattaagattgcgattttctcccgtcgtagagaaatagaaattatgaaattagtaggagcgaccaactggttcatacgctggcctttcgttttagaaggtgcatggcttgggttaattggttcgattgtcccggttgtattaacatttataggctatgttaatatttacaacttggtaaatccgaagttggtgacaagttcactatcacttctgcctccaacaccgttcgcctatcaaatcagtgctttgattattgcaatcggagttctaataggaatttggggtagtgttatctctatccgtagattcttgaaagtctaactaagaaattacttaacttgaaataaaaataatttaaaagaaaaagcttagggagctttttaggaggtaaactttttgaaaaagaatacgtttattgcgatttcactcgcagcagttatcagtttgacgccagcctttacaacaaatgtttttgcagacgtaaatacagacattcaaaatcaagataaaaaaatcaatgacattaagtctaaaaaaacagggttacaatcagatctttctagtttagtagcagatcttgagaaagctcaagaaaaagcgaaatctttacaaggagaatttgaccaaacaggcaaagaacttaaacaacttaatcaagatattaaagatatcaatgaacgtattaaagaacgcgaaactgttttaaaagaacgcgctcgtgcaatgcaaaaaacttctaattctaatgcctatcttgaagtaatcttagatgcagaaaacctttctgacttagtaggtcgtgtttctgcagtaaaccaattagttgattctgacaaatctattttagaagatcaacaaaaagatgaaaaagctttaaaaactaaacaaactgcagtaaagaaaaaacaagaagaacaagcaactgcaattcatgaattcgaagcacaacaaaataaaattgaagcacaaaaagctgaaaaagaagcaatcgttgctcaattagcagctgatcaagcaagtgctgaaaacgaaaaagctggtcttgtaagtgaacgtgataaagcagcgaaagaagcaactgctcgcgcaactgctttacgtgaagctactgatgcaaatgttggacaacaaacaacaaacactaatgcttcatctaacagcaaaacttcaaacaaagtagaatcaactaacaatagtgaagcaccaagcgctgcaactccatcaggtggtggatattctgcaatgatcgcagcagcaagagctcaacttggaaaaccttatagccttggagcaactggcccgagcgcatttgactgttctggatttacatcttatgctttccgcgctgcaggagtttctctaccaagaacttctggcggacaatatgcagcagcttccaaaattagtgctagccaagcaaaaccaggtgacttagtgttcttcaactacggtggcggaattgctcacgttggaatttatgttggtggtggtcaaatgattaacgctcaaaacaacggtgttaaatatgacaacatcactagcggttactgggctaaatatcttgtaggatatggccgcgtagctaacttctaataagtattgaaaagttaagaagcacctttgtcgttttaaaaacaaaggtgcttttttatatggaacgttaagggaatgaagaagttcctagtcaaatagataatagaaaaggagcttattatgcttaaaaaatatggggtagtaacagcacttagccttttgattatttctgcaccattaacaagtgttaaggcggaaagtattaatgacatgcaaaaacgccaaagcgaaatagagcaaaaaaaatcagagctaaataagaatctagacacaaaaaactcagaattaaaccatttagaaaacgctgaaaaagacgctgctaaagaattagaatcacttttaaatagcattgatgaaacgaataaaaagttgaaagaacaagaagataaagttgattctgaaaatgaaaagctgaaaaaactaaagaaagaaattgaaaagctacgcaatgatattcgcgaccgtcaaaaagtgcttgatagtcgagcgagagctattcaaacaacaggaactgccacatcatacttagacatgatttttgaagctgatgattttaaagaacttatcgaccgcgtgacagttgtatccgcaattgttaaagcggaccaaaatataatgcaagatcaaaaagacgatcaaaataaactaaaagtagcagaaaatagttcagaaaaaaaattagaaaacttaaaagtgctagcagttgagctagaagtatcaagaaacaacatggaaagccaaaaacaagaaaagaatgacttagtgatggctcttgcaaataaaaaagacttaacgaaaagtgaacaaacacttttaactaatgaacaaggtgctctttcagacgaacaaaagaaacttgcttctaatattgctggtgaaaaagcaaaacaagaagctgcaattaaagcggctgaagaaaaacgcatgcaagaagcagcggctaaaaatgccactgtcgcagcgcagcaaccaagctctgtaacatcttcagcaggaactggcgcaactgacacagtaagttctggtggcgggcagtttatcaagccagcatcaggaatgttaacatctggatttagtgagcgtactaacccagttactggaaaatatgaatctcataaaggtcaagatattgcgggcggaggtacgattacagtatccgctgcggcatctggtagagtcgtattttcaggatttggcgcaacaggtagcggctttggaggttatggttacgtcgtgaaaattgatcatggtaatggcttccaaacattatatgctcatatgcgtgccggtagcttgaaagtagtaactggtcaacaagtatcacaaggacaaccaattggtattatgggatccaccggtcaatcaaccggacaacatcttcattttgagattcacaaaaatggtattccagttgatccagcaccttatatttaatttgaaaaccattgatgataaatcaatggtttttcttaggtgaaaacgaactggaataggctaaatacggtttttatgatatgatactactatcagtttgtgtaagaaaagggggaacacaatgggactattagcttatttattagtcattttgctgattttaaacgtattctttgcggcagtgacggtcttcttagaaagacgcgatacatccgccacttgggcttggttactagtcttaacttttgttccaatatttggattcattatctatttaatttttgggagaaagctttcagggaaaaagatttttgattggaagggacaagaaaaaatcgggatacaagagtcaacagcaaatcaaatagaaatgatacgtcaaaaagaatttccatttagcgatccaaatgtaaaaaaacatcgcgatttaatttacttattgcttgttaatgatggagctattttgacgcaagataatgaagtagagctttttattgacggtcacgaaaaatttgatgctttaatagcagatattgaaaaagcaaaagatcatattcatctcatctactatattttccattcggatgagcttggaaaccgtttgatgcgagtgcttgaaagaaaagcagcagaaggtttaaatgtaaaaattatttatgatgcaatgggttcacggacgacgaaaaaatcatttttccgtactttcgaaaaaaatggcggtttagtaagaccatttttcccatctaaattaccattaattaatttccgtttaaattatcgtaatcaccgaaaattggcgattattgacggagatgttggttatattggtggctttaatattggtgacgaatatcttggacgttcgaaaaaatttggttattggcgcgatacacatttacgcgtgcatggtaaagcggtatatgctatgcaaacccgatttatcatggactggaattcggcatcatctactcataaaattgactataaagcgagatattttccaacatttcacggtaaaggccatacaagcatgcaaattgtgtctagtggtcctgattccgaatggcaacaaatcaagaatggttatattaaaatgataaatgctgctaaaaaaacgatttacttgcagtctccatattttattccagatgcgagcttgcttgaggcgataaaaattgcagcactttcaggagtcgatgttcgtgtcatgattccgaataaacctgaccatgcttttgtttaccgagcaacaactaattacgccggtgaacttatggaaacaggagctaaaatcttcatttatgataatggttttattcatgcaaagaccttagttgttgatggcgaaattgcttctgtaggaactgccaatatggactttaggagtttccgcttgaattttgaagtcaatgcttttatttatgaaaagaaaatggttcaaaaattagaagatgcatttttagaagatattttgaaatcgtaccaattaacacctgaattatatgcaaaacgatctttatggattaaatttaaagaagcggtaagtcgacttttatcgcctatattatagaagtaacttaagggagagctggtgtagaaaatggatgtttttagtgaaatacttaatggaatagggagactacttctacaaccagcattgtatgtaggaattattttagtgataattgctggttttaatcgagtgaagtgggagcggaaatcgtttagtattagcatttattcgccgtggttagaactgaagaatttctttggcgtgagtttgttgtttggtctagtgctatccattattactacacttattggatttagtgtaatgattgaatggattgcgatttttaatgccgtagcttgtttcttattaattgttgggatgttccgacttagctctactgcttttactattggaattaccagcttaatcttttatttctgctattatttcgatgttaacttgtcaccatttaccaatctagagtttacatatgatgcaatatttatagataattttatgatttcgatgacatttttactggcgattttgctgtttgtagaagctttcttgattcaatacacaagcgcgaaaaatccgtcaccatctcttcgtaaaagtaaacgtggtaagttagtcggttcatttcagttaagaaaattatggtttgtaccacttgttgtttttattcctggagatgtgtttacgaagatttttgagtggtggcctgtgtttacaattgggtccgagtcatattcgttaattattttgccattattcattggtttccagcagcaagtacaagcgcaattgccagaagaagctagtaaaaaaattgccgttcaagtaactacactagcaacgattattgctgtagctggtttgattggaatcgtaatgccagtactaacactttttgcgtttatgttcgctgtgatcggtcgattttggatttcctatcgtcattaccgctccgaacaattactaccgaaaaaatttggtccgcaacctgatgggcttgtagttcttggcgcccgtgaaagcactccttcgacccgtttgaatttaaaagcaggcgaaaaaattacagaagttaacggacaaaaagtgcacaatcgtgaagaactatacgaggcgcttaacttaaaccgcgcattttgcaagttaaaagtaattgataacgctggtgagccacgttttgaacaaacagcactttatgaaaatgaatcttttgaactgggtttattattagttgaaccgagatgattttaaaacaccagtggcagcattggtgttttaagtttttgtaaagataagattaatataaatgcatttctacccgaaaatagttaattcatgctatattttagataaaagggttacataaagaagggatgggaagtaagttggtaaaaattcttgtagttgatgatgaggcttctattgttaccttgttgcaatttaatattgaaaaagctgggtttgatgtagtcacagctgaagatggtagaactgggtacgaacttgctctatcggaaaaaccagatttaattgtacttgatttaatgcttcctgaaatggacggaattgaagtaacgaaaaaactccgccaagataaagttggagttccaatactaatgttaactgccaaagatgaagaactagataagatcattggtttagagttaggtgcagacgattatatgacaaagccgtttagccctagagaagttgtcgcaaggattaaagccattttaagacggacagaaggcaaggccgaagttaccgaagaaaaaacggaagatacagaagcgactattttaattggtgatttgaaaattttaccggatagttatgaagtatatttgcaagatgatttattagatttaacgccgaaagaatttgagctgctcttattcctagccaatcatcgcggcaaagttttttcgagagatcaattgcttgatacggtttggaattatgattatgtaggtgaaacgcggattgtagatgttcacgttagccatttacgcgataaaattgaactagatactaaacaaccgaaatacattaaaacaatacgtggattcggttataaaatggagaatgtaaaataatgaaaaaattatggctgaaaatcgggttatctttttttatcttatttttcgttgtgatggttattgtaggtattttctctggggaattaatgaaatccacttatttaacgatgaaagaaaaccagctagaagatgacgcgaaaatcttactgcaaacaactaacattgagaatttaaatttggatgaagatgcaggaacgattcaaaaaacacttgatccgcttggtgatgaaattgatgctcgtattacggtgattgataatgatggtgatgttgtagctgacactaaaaaagatcctgataacttaaacaatcatatgaaccgcccggaagtagctgatattcttgaaaaaggaaagaatgttggcatttcaattcgggaaagtgattcacttggttatagtatgctttacgttgcggttcccgttaaacatcaagggaagacagacggcgttttaaggatttcaatttcccttgagtcggtggatgcagcagttgctaaactttggggcaatttagctctgattttcggtattgctctagtcattatcgcagccatcagtgttttcatcgccagaaaaattactagaccagtgaatgaaattattgaagtttcgaccgatttggctaatcataaatacgacagccgcattcacggtaaagtaagcggcgaacttcaagacctttctgtcagtgttaatatgttagcagaaagtttagaaacacagatgttcgaaattaagcaaaatgaacaacgacttaatgctattgttcaaaacttagtgagcggcgtaatgcttatcaatgtcgataaacaagtaatcatgactaaccgaacaatgtaccaaattttaggagaaaccgaaattactggaaaaccattttatgaagtaattaaaagtttcgcacttagtcaattaattgatgcaacttttgaaacaaaaacgatgcaacaaaaagaaatcattctttatttcccgcgggagatgattttagatgcaagtgtttcgccaattttagcagaaaacggtgaaattaccgggattatcttactactacatgatattactcaaatccgccatctggaaaatgtccgttctgaatttgtgacaaacgtatcccatgaactaaaaacaccagtaactgcactaaaaggattcgcggaaacactactagacggcgcaatgtacgatgaaatgctactcaaaaaattcttaacgattatcaaagaagaaagtgatcgacttcatcgattgataatggatattctcgcactttctagaattgaacaaaatcctgtggcagaaaacactgagccagtagatgtagatgaagttatcgaacaatcttcccggactatttttgaaatggcgaccgaaaaaaatatccaagtatctgttccagaaaaaacgattccgccaatcattattgaaactgatcgtgataaattgcagcagattttaattaatttactttctaacgcgataaactacaccccagtagatggaaaagttgaagttaaattaattaatcaagaagcagaggttataatagaagtaaccgataacggaattggaatacctgctaaagatattgaccgcgtgtttgaacgattctaccgagtggacaaagcacgtagcagacactcaggaggcactggacttggactttctatcgtcaaacatttagttgaaaactgtggtggacgaatcgaagtagaaagccaagaagaagttggctcgaccttccgcgtcactttaccaaaaaaagcctaataaatatcctgtttgaaagaatgtaatctttcggacaggatatttttattttatttacgaaagaaacaaatttggtgtaataatttaccagtttgccttttatttgaaagatattcataaaaaagtttacattttcgacaaaaaatgaggtaatttacaattacttaacattagctacacaccaccttaaatctcacgcgttatagtgatacttgtaaggaataactattaaaaaaacaaggtgggaataagataatgaaaaagaagtatttgggaatagtagcaatgttagcagcagtaatgcttgtcttcgcagcatgtggaagtgacagcagttcaaaagataaagcaaacggatcaacaaaaggggataaagaagtttctggctcattaacagcagtcggatccactgcacttcaaccactcgttgaagcagcttccaaagaatttacaaacactaaccctaaagctcaaatcaatgttcaaggcggcggttctggaactggtttaacacaagtacaacaaggtgcagttgaaattggtaactcggacgtattcgctgaagaaaaagacggcgtagatgcttcaaaacttgttgatcatcgtgtagcagttgttggaatggcacctgtagtaaacaaagatgtaggcgttaaaaatattactaaacaacaattaatcgacattttcactggtaaaacaactaactggaaagacgttggcggtaaagacgaaaaaattacaatcatcaaccgtgcggaaggaagcggaacacgtgctactttcgaaaaatggggacttgatggtaaaacaccagttaaagcacaagaacaagattcatccggtacagttcgtaaaatcgtaagcgaaactccaggagcaatcagctacctagcattctcttacattgacgcttccgtagttggtctttcattagatggcgttgaaccaacagaagaaaaagttgcaactaacgattggaaaatctggtcttatgaacatatgtatacaaatggcgaaccaaaaggcctaacaaaaactttcttaaaatatatgacttctgatgaagtacaaaacaatatcgtaccacaacttggttaccaatcaatcaaatccatgaaagtggaacgcgatgcatctggtaaactaactgacgtaaaataaaaagaatgaaatgggcgtctatcctagtaatatcaggatagacgtatacccatgttaggagtaaacatgggaggagaaaggagcttacgtgacttggaagcgataaaagaaaagaagcttacacaaacttctaaaaaggcgcatctagaaactagaggcaaaattattacattcatctgtatttctatcatggttattgccgcagcgtctattttgttttttgttatatcgaaaggtttagcaacatttactgtcaataaagtgtcttttgttgattttataactggaacagactggaacccttcgcaaaaagatgcaaatggaaatccattagttggcgctttgccaatgattattggctcttttgcagtaacgctttttgccgcttgtattgcaggaccacttgcaatcggtgcagccatttttatggtagaaatttcacctaagtttggtaagaagattttgcaaccagttatggaacttttagttggtattccatctgttgtttatggattcattggactaagcgttgtcgttccatttattcgcgaccatatttcgggaagtgggtttggtattgcagctgcgaccgttgttttaacagtaatgattttgcctactgttacttcactcagcgtagatgcaattaaatcagttccgcgtcattaccgagaagcttctttggcacttggagcaacacgtttccaaacgatttggaaagtagtgcttcgtagttcgcgttcagggattttgacggcgattgtatttgggatggctcgtgcattcggtgaagcccttgctgtacaaatggttattggtaactctgctgttattccaacatccttatttgaaccagcttccacgttaactagtattttaacaatgggaatgggaaatacggttatgggtacgcttgataataatatcctttggtcacttgcaatggtgctactcgcaatgtcactatttttcatcattgtgatccgtttcatcggacgtaggaggaaagtcaaatgaatgtaaaaacaaaagataaaatcgcgacaggcgttttctatgccattgctgtattaattgtcattatcttagctggtttactcggctatattttagtaaaaggtgttccgcaacttagctggaagtttttgacgaccccaccacagtcgttccaagctggcggcggaatcggtcctgaaatctggaactcattttatatgctcgttatcacaatgattatttctgttcctatctcgctcggtgcgggaatttatatggcagaatatgcgcgtaaaaattggattacagatttaattcgtacaacgattgaagtgctttcctcacttccatctattgtcgtagggctattcggtttccttgtttttgttattcaaatggggtggagcttctccgttatttccggggcgcttacactaacgattttcaatttaccactattaattcgtgttgtcgaagaggcgcttaatgctattccaaacacgcaacgtgaggcaggacttgctctagggttatccagatgggaaacaattacgcgagtacttgttccagcggcattaccagcaattattaccggggttattttagcagcaggacgggtatttggtgaagcagcagcgttaattttcacagcaggacaaagtacaccaatccttgatttcactgactggaacccggtcaatccagcttcaccactaaatattttccgcccagcagaaacgttagctgttcatatttggaaaattaatggtgagggaattatgccagatgcgcaagctgtttctgacggagcttcggctgtattaattctttccgtattacttttcaatgtcctagctcgtttgcttggaaaatttgtttataaacgcatgacctcgtcgtaaaaagccaggaaaaggagattttaaatgatgttaacgaagaaacctgaaattaatacaattttacaaactacaccagatcctcactcacttcctgctgcgatggcgacagaggatttgcacgtatattatggagataatcacgcaattaaaggtgtcgatttaacgttccctgaaaataaagttacagctttaatcggaccatctggttgcgggaaatcgacttatttaagagcattaaaccgaatgaatgatgaaattgacggttgccgtatggaaggacaaattttatacgacggcattaatattaaccgcaaagaagtcgatttatacaatgttcgtaaagaaataggcatggtattccaaaaaccaaatccattcacgaaatctatctatgaaaatgttgcttttggacttaaacgtcatggcatgaaaaacaaaaaagaaattatggagcgggttgaaaaaagcttgcgccgtgccgctctttgggacgaagtaaaagacgatttaggaaaaagtgcactatcactttccggtggacagcaacaacgcctttgtatcgctagagctgtagcaatgcagcctaaagtattgctacttgatgaacctgcttcagccctagacccaatttccacaagtaaaattgaagatttaatcaatgaattgaaaaataaatataccattattatcgtaacgcataatatgcaacaggcagcacgggtttcagactacacttctttcttttatctaggagaagtcgtggaattctcaggaacatccgaactatttacgaatccacaagaaaaacaaaccgaagactatatttctggtaactttggctagaaaggagcttttttatgacaaccgaaactgctgaaaaagtagagtacattattgaaacaaaagacgtagatttattttatggttccaaacaagcactacaaaaaatcgctttaaatattaaaaagaatcaagttaccgcattaattgggccgtcgggatgcggaaaatctacttttctaagaacgcttaatcggatgaatgatttaattccaaatgtaaaaacaactggcgaaatccatattggcggagaaaatgtccaagatccgaaaattgatatggttaatttacgaaaaaaagtgggtatggtctttcaacaagccaatccatttccattttcaatttatgataatgtagcttatggtccacggatgcacggtataaaagataaaaaagtgttagatgagattgttgagagaagtttgcgtcaggcggctctttgggaagaagttcatgatagattagatcgttcggcaattggcatgtcaggtgggcagcagcaacgactttgtatcgcacgtgtgcttgcagttaaaccggatgttatcttgatggatgagccgacttctgcactagatccgatttcgacagcgaaagtagaagatttgattttagaattaaagaaagactatacgattgttattgtgacacataatatgcaacaggcatcccggatttctgatgaaactgcctttttccttaatggccgcatcgtggaattcgcggatacaacaagtatttttaccaacccagcagaaaaagaaactgaagactatatttcaggaagatttggataaaggagtgttattatggtagtcagaaaaattttcacagaacagttaaacgacttgcatcaacatctaatggaaatgggaatgcttgcgaatgaagcgatttttaaagcagtaaaatcactcgtacatcgtgacacggagcttgctaaacaagtagtcgcagaagataaggcaattaataatatggagctctcactggaacaacgctcttttgagttaatcgctttgcaacaaccagtcggtatggatttacggaaaatcgttaccgtgctcaaaacaagttcagatttagaacgtattggtgatcacgcagtaagtattgccaaaacagctattttaattggcgaaagtaaagttttaaagccgattcctgaaattccagaaatgggtgaaattgtaaaatcaatgctgcaagatgtcttaaaagcatatctttcggaagatgatgaggctgctcgtgaaatagcagcacgcgacaatgaagtagataaactgcataaaatcgtttatcaaaaatgtattaattttatgcaagaagaacctgagcacattgaagatgtatcgcaattacttttagtttctcaatatattgaacgcattggtgattatgtgacgaatgtttgtgaatggattgtttacttgaagagcggtgaaattgaagatttaaatagataaaaaaagcccgattttcctttccacaggttaatcgggctctttttggtgtgtgttaggcggtttaaataacttctcaaatatttaaaaccttagctatcctccaatactcctttcgttgttataaagaaattgtatcattttaagagagaatattacttttttgctcatatttaatcatttttgaatgaagaggtagttaaacttgcggaatcattcctatttaagtatcatatgaatatatgaccatatatgaagaatgaggtgattctgatggaaaacgcaaaacaaactttagatgaagagacgctttttagtgtaacgcaaattttcaaggcgctttctgatccgacacgtgttcaaattttaaacctgcttcaagagcgagaatactctgtgaatgaaattgcgcgaacgctgacttttaatcaaacaacggtttcacaccagctccgttttttaaaaaacttaaggcttgtgaaatcaagacgtgaaggcactacaatttattatatgcaagatgataatcacgtattagaattactgacccaagcaattcgccacgtgcaccatcactaacaacaagcgctcagaaaacctttttaggaatgatgggtgttttttatgccaaataatgagagattatgataaagtagttaacaaataaaaatttggaggaaacattttgagcaaattatcgccagtacaaaaatttatcgtcattgcgggaatagttgtcatggttattatttctattttagcagttatttggaatagcaatcttgcggcagttattggtttgtcggttgcacaatttattattattcagttggtatgttatgtaggaatatattcgcatatgaaagtaggaacagcacgaggtacgaaactttttagttggggaatattaacgacacttctgttttcagcaattatttttatttttgctacagataattttagaacctattccgcagcaatgatcgctctaattggttactgtgcagcattaatgatgcgcgaaatcgaaaatactaatcctgccaataaaaaacaaaaaagagaggaataaaacgaagaatggagtgatagtatgggaattcatcaatatttccaaagtttatcggatttagagaacatttatcgttgcccgggaaaatttaaatatcaagagcattcggttgcagaacactcttacaaggttacttctattgcacagttttttggagctgtagaagaagatgcgggcaatgaggttaattggcgtgctttatatgaaaaagcgttgaatcatgactattcagagctttttattggtgacattaaaacacctgtaaaatacgcaacgacagaactaagagaaatgctctctgaagtggaagaaagcatgactaaaaattttattagccgcgagataccagcaactttccaaccgatttatcgacacttgttaaaagaagggaaagacagtacgttagaagggaaaattctcgctatatctgataaagtagacttgttatatgagtcctttggcgagatccaaaaaggtaatccagaaaacatttttgttgaaatttatagtgaagcacttgcgactatttatgaataccgagaaatggccagtgtaaaatactttttaaaagaaattttaccagatatgcttgctgaaaaaggtattgaaaagacggaattaccacaacttactacagaaataacgacaaaagcattgcgtgacgagtaaaaaattggggagggaagtaagatggatcaaattatatctgcacttattttcccttgtctgcttgtcattctctttgcgcgcatcacgtataaccgttatgtcgccttagtgcttatggtggttttgatagccgcttctgccaaattgggttacacaagttcgttttggctaatcacgatagacgccttttcgatgacaattggttttgtcgtagccacatacatgttacgacgtttaaagaaaagcggcagtgacttttaaagagcaaatagataggtagaatactctaaaagtgataaaataaagaaaagcgtaatcaacaggttgcgttttttattttcaaatgaatacgaaaatatgttcggtttttgctaggctaattaaaatatttatgataaaatagaaacattaacggatctgaaaaatccgctttttgctttgctggatattttacagttaaagcttttagatgccagaatcggaccgataaggaatgggggaatccgagttgaaggataaatttgagttagtttctaagtatagcccacaaggagaccaacctagagcaatagaacaattagttgcgggattaaaaaaaggcttaaaacaccaaaccttacttggggcaaccggtacagggaaaacttttactgtatctaatgtaattcaagaagtaaataaaccaactcttgttatggcacataataagacgctagcgggacaattatatagtgaattcaaagagtttttcccgaataatgcagtggaatactttgttagttactatgattattaccagccagaagcttatgtaccgcagagtgatacctacattgaaaaagacgctagtatcaatgacgaaatagataagcttcgtcactccgctacagcagcactttttgaacgtagagatgtaattattatcgccagtgtatcttgtatttatggtttaggttcgccggtcgaatacggagaaatgctagtttcgcttcgggtaggcatggagattagccgagaccaattgttacgcaagctggttgatattcaatatgaccgaaatgatattgattttcagcgcggtcgttttcgtgtccgcggagatgtggtcgaaattttcccggcatctagagatgaacactgtatgagaattgaattttttggcgacgaaattgaacgtattagggaagtagatgcccttactggagaaatcataggcgacagagaacacgtttctattttcccagcatctcactttgttactagaccagatattatgaaaaaagcaattgttaatataaaagcagaacttgaagaccgccttaaagtcttaagagcagaaaataaactactggaagcacagcgtcttgaacagagaaccaattacgatatagaaatgatggaagaaatgggttattgttcaggtattgaaaactattcaagacatttatcactacgtccagcgggagtaactccatatacattgctagattatttcccagatgatttccaaatagttattgatgaatcacatgtaacgatgcctcaaattcgtggcatgttcaacggggaccaagccagaaagcaaatgctagtcgatcatggttttaggttgccaagcgcacttgataaccgtccacttcgattagaagaatttgaaaagcatattaatcaaattatgtttatctctgcaaccccaggcccatacgaattagaaaagaatccagatgtaattgaacaaatcattcgacctaccggactactagatccaattgtcgaaatacgtcctatccaaggtcagatagatgatttaatggatgaaatcaatgatcgagttgagaagaacgaacgagttctaatcactactttaacgaaaaaaatgtcggaggatttgacgaattacctaaaagaagccggcgtaaaagttcaatatttacattctgaggtaaaaacattagagcgaattgaaattattcgtgaccttcgattaggggtatacgatgttattgttgggattaacttactccgtgaaggaatcgatttaccagaggtgtccttggtagcaattttagatgccgataaagaaggtttcttacgttcagaacgttccttaatccaaacgatgggacgagctgcccgtaatgaaaatggacgagtaattatgtacgcagataaaatgacagattccatgcgcaattcgattagtgaaactgaacgtcgtcgtaaaatccaaattgaatataacgaaaaacatggcatcacaccaaaaacaattagaaaagaaattcgtggcattatcgcagcaacttctgccgcagatgaacgagaagcaataaaacaacatgatttaagtaaaatgtctaagaaagaacgagatattttcattgaaggtatggaacacgagatgaaagaagcagccaaagcacttgatttcgaacgtgcagctgaacttcgtgatgctttactggaaataaaagcggaaggatgaagcggaattggataaagaaaaaatagtcattcaaggtgcaagagcccataatttaaaaaacattgatgtagagattccaagagataaattagtagtgatgaccgggctttctggttcaggaaaatcttcgctagcttttgatacaatttatgcagaaggacaaagacgttatgtagagtctttgtctgcttatgctcgccaatttttaggtcaaatggataaaccggatgtagatttaattgaagggttaagcccagctatttctatcgatcagaaaactactagccgtaatccgcgatctaccgttgggacagttacagaaatacatgattacttgcgtttactctatgcacgagtggggcatccagtgtgtccaaaccacggcattgaaatcacttcccaaacaatcgaacaaatggtagaccgtgtgctcgaatacccagaaaaaacacgtattcaaattatggcgcctatagtttctggtaaaaaaggaacacataagaaaacaattgaagaaattaaaaaagaaggctacgtacgtattcgggttgatggagaaatatacgatattaacgacgaaatcgaaatcgaaaaaaacaaaaaacattctatcgaaattataatcgatcgtattgtcattaaagaaggcataaatactcgactatatgattctattgaagctgctctacgcctggctgatggatacgcagtagtggaaattatgggtgataaagaattactatttagcgaacattatgcatgtccttattgtggtttttcggttggtgaattagagccaagaatgttttcatttaatagcccgtttggtgcttgtcctacttgtgatggacttggaacaaaattagaagtagacgtggacacggttattccggatagaagtttaacattaaatgaaggcgcaattgttccgtggagaccaattagttcacaatattatccacaaatgctagcttctgcttgtaaagaatttggaattgatatggatacaccgatagaagaactttcgaaagaagcattagatattgttttaaatggttcaaaagacaaagaattttactttgaatacaaaaatgattttggtatgacacgagaaacttggattccgtttgaaggaattctgccaaacatcgaacgtcgttaccgtgaaactaattcagatttcactcgcgatcaaatggcgcagtatatgacggatttaccttgcccatcttgtaaaggatatcgtcttaaagaagaaacactttctgtcaaagtgaacaatcatcacatagggcaaattagcgagttttccatcaatgaagctcttgatttctttgatagcctagagctttcagaaaaagaaacgcaaatcgcggcgccaattttcaaagaagtgcgagctagactagggttcttaaaaaatgttgggcttgattatttaacaatgagccgtgctgctggaactttatcaggaggagaagcacagcgaattcgactagcaacccaaattggttcgagattgactggcgtactttacattcttgatgagccttccattggacttcatcagcgtgataacgatcgattgatcaacacacttcaaagtatgcgagatattggaaatacgcttattgtcgtggaacatgatgaagacacaatgatggcagcagattatctgattgatattggtccaggtgctggagaacatggcgggcgaattgttgcagccggaacgccagaagaagtggcgaagaacaaaaactctatcaccggggattatctttctggcaaaaaattcattcctgttcctgccaaaagaagaaaaggaaacggacttgaattagaaatcgtcggagctaaagcaaacaacttaaaaaatgtaaatgccaaaataccactagctactttttcatgtgtgactggggtatccggttccggaaaaagctcactagtcaatgaagtactaagaaaagcgctagcgagaaagcttaatcgaaatcacgccaaaccaggtgaacataaagaaataaaaggaatcgaaaacctagaaaaaatcatcaatatcgatcaatctccaatcggtagaacaccaagatctaatccagcaacatatactggcgcgtttgatgatattcgtgatctattcgcgagtactaatgaagccaaagtccgtggttacaaaaaaggccgtttcagtttcaacgtaaaaggcggtcgttgtgaggcatgtaagggcgatggaatcataaaaatcgaaatgcactttttaccagatgtttatgtaccttgcgaagtttgtcatggtaaacgctataatggcgaaactttggatattcgctacaaagggaaaaacattgccgaagtgctagaaatgactgtggaagaagggttagaatatttcactaaccaaccgcgaattgctcgcaaactgcaaaccattgtcgatgtgggactgggctatattcgtctcggtcaacctgcaacaactctttctggcggtgaggcgcaacgtgtgaaactagcgtccgaacttcataaacgcagcaacggtaaatcattctacatccttgatgaaccaaccactggactccatgcagatgacatcggccgtttactaaaagtattacaaagacttgtagaagaaaacggcgatacagttcttgttattgaacataatttagatgttattaaacaagctgactacttgattgacttaggtccagaaggtggcgatggcggcggtcaaattatcgcaactggcacaccagaaaaaatcgcgcgttctaaaaaatcatacacaggcaaatacttaaaaccaattttagaacgtgacaaagaacgcacagaagaacgtattgcaacagctaagaaaaaataaatctaaatcccgcttatattttaataagcgggatttttttcttgtgccgaagaccaaaccacccaaagtctaaacaaataatcatcctctggttgtatgacagaaattattttttccttcataatagagtcatagataaaacagatagattacttgcacatgaagcaagcctaaaatagctaaaccgaaaaattaggaggaaatgaaaatggaaaatgaacgtaaacgtattctcgaattagtgaaacaaggtatcatttctactgaagaggcccttaccctacttgaaaatatttctaaaaaagaaggtaaatccgcagcaaaagaaaatatccgtcgttctacagcaccaagagaagaacgtgttgaagaaccggaagaagaaccaacgtatgattatagcaaaggttggaacaatgaaggaaatccttacactgctccgaaaagccgtaagagacgcccagaaccaactccagaaaaccatgagcaccaagaagaaaatgaaaattcttctaaagaccgtgaagactccatgcgcaatatggtcaatgacttatcacaagctggtgaaaagatcggttctttcctaaacagcgcgtttaaacaagtaaaagatatgccgtttccatttcttacatctactaagattgaacgtgatttcatttaccacgacacaacgctttcaattttagaatttgaaattgctaatggtaatgttgaatttaaaccatccgactcaaatgatattaaagttcacgcgatgattaaacttttcaaagaatatccagaagatgaagcacttaaaatcttttttgataaaacgactttacgtgtagatgaagaaacattgcgttttgaatcaacatcgaaacaaatcgttacgaatttaactgtgtacttgcctcgtcgtgagtatgattatgtttctgtaaaaatgctgaatggtaatttccacatggatgaattatcaggccgcgatttatttgtaaaaacaacaaatggtaatgttagcattggtacactaaatgctactttagctgaaattgaatcaattaatgggaatgtacgtatccaaaatggtgaaatccgtgatgtagcacttaaaacatttaacggtaatgtggcagtaaaaggtaattattactcaacaaacttgcaaactaaaaatggtaacgttaattatcagctaactggtaatgaagctactttcttaaaagctaaaacgggtgccggtaatatcgaagtaatcgtaccaacaactattggtgtagatggtcgcttccatacaaaccttggaaaactatatttagacttaaaagatgccgaagtacttcaatcaaaaactgaatcagtaagtaaatcaattgtatttactaaactaccaacagcagctgattcttcactaaaaatcgaagcagaagcaactacaggttccgttaagattcgtgatgcaaaataataaattgaaatctagcgcggagaaagcgcgctagattttacatagaaataagaaaggaagagctaacatggataaaaaattaagaagatcaagagtggaccggaaagtcggcggtgtttttggcggactagccgaatttctaggaatagatgccacacttctacgccttatctatattatcatcacgattattacgatgaaaaccggtattgcgattattgcttacatcgttgccttgtttgtgattccttcttctgacacaagtaatgaggaagtacttgaacggcaccgtcgccgcgttgatgaaaaaagaagacgccacgccgaccgtaatgaagcgagacaggaagtgcgagaagcgatgagaaatagccgtcatcacaacagacaaaaaccagttagaccagaaccaatccatcacggagcaagaagaaaagaagctcgtcctcgtccagtgcgagaattcaattttgacgatgcaactttccgctcttttacaataagagtagctactggggatgttattatccgttcttgggacaaagatcaaatgaaaattcgtgccgtactagctgtacacgaaaaagcacgctccattcgtcaattaagtgaagaaaaactctgggattacttctttagccaaacaatgctagacatttcaccagatagtttcacttttgaatcaaaaaatgaattactaaaaacagatttagttgttactattccaaaacgtttatatgaacaagtaaaaattcaattacttaatggtaatttgaaatatgatgatacagctgcagaagatgctattatcaaaacacgtcacggcgatattcgttcttcaggagctagtggtaaattcctcagcacggaatccaaagacggcgaaattttcttcaaacgcagctcagttgaaaatgtagatatgtctactgctaaaggagacattgctcttcaaggtaatttccatacaacaattgctaaggcggctcaaggggatgttgaatatattctcgaaaatgaaacttcctcagctgcagatttagaagcaccaaatggcgatattcggattcaaatcccgccaacgtggaatgttgatggaacactcggaacgaagaaagaaaaaatttacttcgacttaaaaaatgcaaaaatttgggatgacgcagaaagaacttttgttttcactcaaaatgcagaagagataagtatggcaacacttcaagcgaaagtaggaaatggaattatcaaagtttctgaactcgaaacaaagaacgtttaataaaatgaaaggaagggaaaacaatgagaaagttatataaatcttcatcacaaaaaatgtttgctggtgtttgtggtgggcttgcagaatactttggtattgaagtaacaatcgttcgtctaatctgggtagtggctactttattctttggatctgggattttactttatatcttagctgcgattattatgccaaaagcaacacctgaatcagaatgggagtgaactaaaatatgcgttggattataggcgtaatcattaactcggtgctttttgtagcattatctggattctttacaagtttccacgtagatggattcacgacggcgctactagcgagttttatattagcaattcttaatatgctaattagacctattttactccttttaactttaccgattaatatatttacacttgggcttttcacctttgtgattaatgcaattatgcttgaaatgactactttctttattggagattctttccaaattgatggttttggtacagcgttgattattgcagcaattatggcttttgcaaacatgattattaattccgttttatggggtaataaagaaaattaaacattccagttacattttaaggcttcaaacggccttttaaatgtagctggttttgctgtgtagagccatttgggaagaaagaggtagcttgattctctctaaagtgctaaaatgataaggagctttctaaacaatattttgtagcgaacagtaatggacttttataattcatttggaggtacttgcatgacaaaatcggttacggtaaaggatttaaaggaacgacttaatttagagctaatttgttcagaaacgggacttgaaagaccaattttaacaagtgatttatctcggcctggtttggaacttactggatttttctcgtattatccagaagatcgtgtgcagctttttggaatgacggaaatttctttttcagaaggtatggagccggaagaacgacttaaaagatataagcaaatgtgtacgaaacggacgcctgcttttgtgatttctcgaaatttagaagtgccgaaagaattagtagcagcagcgaaagaagcagatattccagttcttcgttcgcgcttaaagactacgcgtttatccgtttatattacgaactatttagaaagcagattggcacctgttatctcaatgcatggtgttttagtagatatttacggacttggcgttttaattacaggtagtagtggtgttggtaagagtgaaacagcgctcgaacttgtaaaacgtggacatagactcgtagcggatgataatgtagaaattcgtcaagaagatgaaatgacgctcatcggttcatcgccagcaattatcgagcatttactagagattcgaggcctcggaattattaatgtaatgactttatttggagcaggagctgttcgttccagtaaaaaaattactatcgttgtgcaccttgaaaactgggacccagataagcattatgatcgcgttgggttggaccaagagaagactaaaatctttgatatggacattccaaaaattactgttcctgttcgtccagggcgaaatttatctgttattatagaagtagcagcaatgaatttccgtttgaaaaatatgggctacaatgcggcagaacaatttacacaagacctaaacaatttaataggtcataatagtagcatgaatgattaaataaatagagaaaagttctccgcagcctaaacaaacagtacgataatcttgtttggttgcggagttgtctttttttgaaagtaggggaattatgggtaatggtgttcagccacttgatccggtggcgattcaaattggtagtatttccgtaaaatggtacggagttattatcgcttcagctgttgtaattgcgttacttcttgcgcttagtgaagcaaataaacgtaaaatggacaaagaaattattgtggatttactaatatgggcgattccaatttcgattattagtgctcggatttattatgttatttttgagtgggatttttataagaataatttgggcgaaatagtgaagatttggcatggtggaatcgcgatttatggtgcgttaattggtgccgtgctaactgcagtcattttctcgcggattaagaaaatttcgttttggaaacttgcggatgttgttgcacctagtttgattattgctcaggctattggtcgttggggtaattttatgaaccaagaagctcatggggcggaaacgactcgagcatttcttgagggcttacatttgccagaatttattatcaaccagatgtacatagatggtgcttattatcagccgacattcttatacgagagtttatggaatgttcttggttttatcgtgttattaattattcgtcggaccaagatacgtagtggggaactttttcttagttatgtaatttggtactcgttcggaagattctttatcgaaggaatgcgaacagatagtttaatgtggggcgactttagagtttcgcaggttttatctttactgctaattgtgttatccattggtttaattatttatcgtcgcgtgaaaatgaatccgccgtattatatggaagataaattgggtaaagtagctaaaaagaaataaaaagttgaagattttcgagtttgtataagaaaggaagaaattatgactgggaaaattactacattgttatttgacttagatgggacactgataaatacgaatgagttgattattaaaactttccaagcaacattacaagaattcttacctgaccgcgtttttacaagagaagatattttaccgtttatcggtccttcactaatggaaacgtttcgggaaataaatccagcacatgcggaagaaatgcgtgtgttttaccgggaatataacttgaaacatcatgatgatttaattttagagtatgatggagtgtatgaagcgattcgagctttgtatgaagaagattataaactaggaattgtatcgacgaaaatgtacgatacgattatgcgaggtcttaaagtgactggcttggataaatttttccaagtggtgattgggttagatcaagtatctaatgcgaaaccagatccagaaggtattgagatggctctttctctgctaaatgcaacgaaggaagaagccattatgattggtgataattatcatgacattgaagctgggaaaaatgcggaaacgttaactgctggagtagcatgggcgattaaaggtccagaacatttggcgcagttccaaccagactttatgttagaaaaaatgagtgacctgcttgctattgtaagggacgaggaataaattttgagacggctgaataggtttaaggcgccggatgagaaagtcaacacgcttttccaggtttataaaaccatttctttttggaaagtcgtaaagaatactgtagtagttgaatttggacgtttttttccttggatgggtggtaaacgtaatatttaccgtgcttgtcttggaatgaaaattggtaagaaaactgctattgcctataaagttatgccggatttattttttcctgagaagattacgattggagaaaattctattattggctatcatacgacaattttaactcatgaatatttgttgtctgagtatcatgttggagaagtcgttattggtaagaatgtgatggttggggcaaatgtaaccattcttcctggaatcgaaataggagacggtgcgattgttgctgctggggcagtcgtttcgaaggatgttccgccagaaagttttgcatatggaaatcctttagtaataaaagaaaaagctgcttttgagtgaaatcagagtagctttttttcttgcccaaagaaataaattctatgttatactcagaagaataaggatattgttggaggtgggaaaatggaaaaagacaaaaaaacaactgcaaaaatttatccattttatccaaatggtcaattttattttgagcgtggagtagaggcgtttcgtgagcaaagaatcaaagaagcgattcgttatctagtacgagcgtcagaacttgaacctggagagccagtgatactttgtcaattagcaatttgctatacggagatcggtcaatttcataaatcaaatcaattactaagagagataatggaaaaacgtcttggtaatatggaatactgctattattttatagccaataattttgcttatatgaaagattatcgtagggcgcttcaatatgcaagtcgttatttagaaatagcagctgatggagactatgccgaagaagctaaagatttaattgaagtattactcgaagaaacgccatttggtgaaacaattgaaaatggtttttctaaattagaacaggaattttattcatataagaaagaaattaatcgttatttagcggaagaagatagtgcttctgcatgtgatattttgaaaaaagtgattgatgagaaaccgaacttttggcctgcctataatcagctagctgccctttattttgagcaattaaaagaagaggaaggcgttaaggtattaagtgatttaattgcaagaaacccggggaatttattgggtttatgtgacttgtttatttatcatttttataaaggtaatcgggaagaagctgactcactttactcggagttgcgggatgttttgccagttctctcgcatcataaagaaaaaatcggcttaattcatgcgatgatgggcgactacgaagaagcagatgatttacttgaacaagtggcggatttggaagttacggagcgtagtaaatactattattatcgcgcgaaatcagcatattatttagatgaagttgaagaggctaaaatgttttggcattcctttttagagtgcgatttatatgaagatactagatttccttgggagcaagaggcggatttaaccaatgatactcgtttagttttagaaatgcttcaagcggaaagtgatatgacgcatcttcttggagtctacgcgatgacagtctcgggaaatcgaccggaatttgtcctgtttcatccactgcttgatatgagtagttggtcgtatatggagcacttgatgtttaccgattttgattattttccagatgggaacgtagaacagaactgctacttaattatgaaagcaatgactattttacgggaaaatggacttttgttaaatgaagaaaatcttcctttatacgaaacgattttttcattagtcttgatggaaaatagaaaagagctcattcttggtcgctatacgattgaaacggttgctagcgcgattgcaaaaatatttttacctgaaatgaaactcgcttcagtagatgaatttgaatgtagcaagtgtgcaagagatattgaacaatttctgagcagataaatagacctttttgctattccgtattaggattaatttagactaactattgtatacacattaatgaggagggcaaaaggatggctagtgaagaaaaaatttatgatgtgattattattggggcgggacctgctggaatgacagcggctttatatacttcccgtgcagatttagatacattaatgattgaacgtggtgtaccaggcggacaaatggtaaatacagcagaggtagaaaattaccctggctttgacagtattttaggaccagatttatccgacaagatgcttagcggggcgaaacaattcggcgctgagtacgcttatggtgatattaaagaagtaattgacggcaaagaatttaaaactgtaacagcaggatcaaaaacgtataaagcccgtgcgattattattgcaactggagctgaacaccgtaaacttggcgcagctggtgaagaagagcttagcggacgcggcgtttcttactgtgcagtttgtgatggagcattctttaaaaatcgagaattagtcgttgttggtggcggtgactcggcagttgaagaaggaacttatttaactcgttatgcagataaagtaacaattgtacaccgtcgtgataaattacgtgcacaacaaattctacaagatcgtgcttttaaagatgaaaaagttgattttatttggaataacacggtagaagaaattattggcgatggcaaaaaagttactagcgtcaaactcgtttctactgttgacggttctgaatcaattatgccagttgatggtgtcttcatctatgttggtcttgtaccacttacgaaagcatttttaagtttaggtattactgatgaagaaggatatatcgtaacagacgaagaaatgcgtacgaatcttcctggtatttttgcagcaggggatgtacgtgcgaaaagcttacgccaaatcgttacagctacaggcgatggcggacttgctggacaaaatgcgcaaaaatatgtagaagaattaaaagaagctttggaagcagaagcagctaaataataaaaaaacaaaaatggatctatagattatttatcttaggtccatttttttgcgtgactaccttgacctgggtagtgtaaaatgaaatacaaagactagttaggagagataaatgatgagtattgttgtacttggtggagcgggctatattggttctcatgctgtagatgagctgattaatcgaggttatgaggtagttgtggtagataatttaaggacaggtcataaggaatctattcacaaaaaagcaaaattttatgaaggtgatatccgggataaagcttttttaagtactgtttttgaaaaagaatctattgatagtgtgattcatttcgccgcgagttcgcttgttggtgaatcaatggaagttcctttagaatatttgaataataatgtttacggtacgcaagttcttttagaagttatggaacaatttggcgttaaacatattgtattttcttctagtgctgcgacatacggggaaccagagcgagttccaatcacagaagatatgccgacaagtccagaaagcacttacggtgagacaaagctaattatggaaaaaatgatgaaatggtgcgataaagcttacggaatgaagtttgtcgcgttacgttattttaatgtcgctggtgctaaagcggatggatcaattggtgaggatcataaaccagaaactcacttagtaccgattattttacaagttgctcttggtcaacgagaaaaattagcaatttatggtgatgattataatacacctgatggtacatgtattcgtgattatgtccaagtagaagatttaattgatgcgcatatccgcgcgcttgaatatttgaaaaaaggtggagaaagtaatattttcaacctcggcagcagcaatggcttttcagtgaaagaaatgcttgaagcagctcgaattgtaactggtaaagaaattccagctgaagtggtaccgcgccgggctggtgacccagggacgcttgttgcttctagcgataaagcgcgtgaaatccttggctggcaaccaacgtatacggatgtaaaagatattattgctactgcttggaactggcacgtgtcacatccaaatggctattaataactacgaaagaatgtggtttatatcaaagtattaaaagaacattttggacggttggaagaaaatgatgtatggcaatggacgttaataaatgaccatgggatgaaaatgagcgttttaaattatggcgcaattgttacttctattgaaacaaaagataaatttggtgaatttgctaatattagtctaggattttcgaatttagaggattatttagcatattcgccgtacttcggtgcaacacttggtccggtggctgggcgtatcactaaaggtcaattttctttggacggtaaaaaatttcaattaacgcaaaatgaaggcgctaaccatcgtcatggcgggaagcttaattttagtaaaaagctttgggatgtttcggtcgaagagaacttagatgaagtgattatgacgtttacataccacatggcagacggcgaaaatggctatcccggaaatattgatgctacaatgacttatacactgaataataagaacgaatggctaattcactatgaagcaaaaacggacaaaccaactatttataatccaagcaatcatatttattttaatttaacaggcgaggctggtacagatgtggtatcgcaccatctttgggtaagtagtgaggcgtttctgccaataaataatgaatctttgccaactggagccatcgcgccgacagaaaatactatttttgacttgcgagcgggtcgtgaaattgctgagattactaggagtcaagaccaacaaataaaactagttggtggtggactggatcatgcctttattctaaaacatgaaaacgggcgacctgatgcggtgttgcttgatacccagtcggggcggcgagtagaaatggaaacagaagcggactccgtgttaatttacacggctaatagtctagctggcaacttttctattcaaaacaaaccagtaccgaaatatgcgggtatcacgatggaaacacaaggattggtggatgcgattaatcatgaaggattcggcaatatcattttaagaccagatcaaccatttaaatcgaaaacagcttttcgttttgcggttgaaagctaagaatgataaaaatgaaagtagcataatgtgaaggagtgtcgggaatgaactggcaagaggaataccaaaaatggattacaaataaagaactagatgagtcgctaaaaaaacaattggtagatatagaaaagaatgaaaaagaattagaagatagtttttatcgtaatatggaatttggtacggcggggatgcgtggcgttctaggtgctggaacaaatcggatgaatatctatactattcgaaaagcatcacttggtttggcacaatttgtagctgaaaacggtgaagaggctaagaaacgcggaattgttattgcttacgatcctcgtcatatgtcgcgtgaatttgcctttgagtcagcggcggttttagggcaccatggtgttaaaagttatgtgttcgatgcgcttagaccaacaccggaactttcttttgcagttcgatttttaaatgcatttggtgggatagtaataacggcaagccataatccaccagaatataatggctataaaatttacggagaagacggtggccaaatgccgccaactggtgcaagtgccgtaatagattacataagtgccgtggaagatattttttctgtagaagtagcagaccaagacgaattaattgaaaaaggtttacttgaaataattagtgaaaaagtagaccgtccttatttggaaaagttaaaagaagtaattgttaataatgagttggtgcaagaacgtggtaaggatttgaaaattgttttcacgccattacatggtacaggtgggattttaggggttcctgcgcttgaaagtgtcggcttcacgaatatcgttaaagtagaggagcaatttgtgaacgaccctgattttggtactgtaaaatcacctaatccagaaaacaaagaagcattttcgctcgcaattgaatatggcaaaaaacatgatggcgatatattagtaggaactgatccggatgctgaccgtttaggagttgcagtacggaataatgacggggaatatgagattttatccggtaatcaaattggtgcgataattttacattacttgttaaaacaaaagaaagcgcaaaatgaactaccagaaaatgcggctgttttaaaatcgattgtcacaagtaatcttgggacggaaatcgcgaaacactttggtgtacagatgattgaagttttaacagggttcaaatttatcgcggaacaaatcaagcattttgaggaaacagggaagcatacatttgaatttggttatgaagaaagtaatggttatatggttaagtcgtttactcgtgataaagatgctattcaggcagttctcgcgatttctgaagtggcacttgtgagcaaaacggaagggcggactttgctagaagagttagaacaaatttatgctgaatttggttattataaagaagatttagtttcgctcactttaagtggaaaagatggatcagagcgcattaaagaaattacaagtggctttagagagcaacttcctacaagcatgggcggtttccgaattgagcgcgcggaagattatttaagaagcgaaactacttggattgaaacaggtaaaactgaagagattcaattaccgaccgcagatgtaattaaatgttattttgaagatggttcatggttctgcttgcgtccatcaggcaccgaaccgaaaatcaaattctattttagcattcgcggtgaaaatgaagcagaaagcacgcaaaaacttgaaaaagtaaaagctgatttgatgcaatatatcgaagcttaaaaaagaaaaatcccggaaactctatttagagacttttccgggattttctagtgggaagtgtgctaaaatgaaaggtagatattatttgtgcgaaaggatgaggcgtatatggcttctaaacaattaaaattagtaattattactgggatgtctggggcagggaaaacagttgcaatgcagtctttagaagatctcggttatttttgtgtagataatttaccgccaagtttacttccaaaattctgggagttaatgaaagaaagcgataagatggataaaatcgcgctcgtaatggatcttcgtggtcgtgagtttttcgattcgattgaaccagcgctagatgaattagataataccaattttataacaacgaaaattctctttttagaggctgatgataaggtgcttgtttcgcgttataaagaaacacgccgtcaccatccactggagcctaatgggtctgtgcttgatggaattaatgctgagcgtgaactgcttagtgatttaaaagggcgctcacagttagtaattaacacttccaatatggcgccgcgtgaacttagagaacgaattaacaatgaatttcaaacagaagacaaggatgttttcaatgtccaattaatgtcgtttggttttaaatatggtattccaattgatgcagatttagtatttgatgttcgtttcctaccaaatccgcattatattgataagatgcgcccactgacagggcttgatgaagatgtttatgagtacgtgatgaaatggccggaaacaatggcctttttagataaattagttgatttattaatgtttactcttcctttttacaaacgagaaggaaaaacgcagcttgtgattgcaattggatgtacgggaggacagcatcgttctgttgctctaacagaatatgttggtaaagcaatccagcaaaaatatgaaacaacgatttcacaccgagatatgaaacgtagaaaggaacgctaatatgagcaaagaaacgaagccgaaagtagtcgttataggcggcggaacaggtctcccagtcgttttaaaagggcttaagaaaaaagagattcatttaacagcgattgttacagttgctgatgatggcggtagttctggtaaaattcgcgaacaaatggacgttcttcctcctggagatattcgtaacgtcatgcttgctttatctaatgttgatccgcgtgtagtagacttgttccaatatcgttttgctgtagatggggatttatcaggtcatgtgattggtaacttgattttgacggcattatcgcaacttaatgatagttacgttgatgcaataaatgttcttgctaccgtactaaaaattcgtggtaaagtcattccagcaaccgaccaaccacttattttaaatgcagaaatggaagatggatcaattgtccacggcgagtcgcttattccacttcaaggcaaacatattaaccgagtatttatagaaccagaaaatgtgaaaccatatccaacagcagtagaagcagttaaagaagcagatttgattgttattggtcctggaagcttatatacaagtattttacctaatttattattagaagaattagctgaagaaattacagcaagtaaagcccagaaagtatacattacgaacattttaacgcaaattggggaaacggactttttctcagatgcggatcatattaaagtcatccacgaacatgttggtaaatcttttatcgataaaacgttaattaacactacaactgttccaaaagaattactatttcctgaagatgtggcgcaagtggagcataatgcggaagaaatggaaaaacttggagtagaagctatttatcaagattttctttctacagaagatggccttgtgcgccacgcagctgataaggtggcggatgcgcttttagcaatgttgcctaataaaaataatgaaaaggagtgagtaagccatgtcatttgcatcggaaacgaagaaagaattaacccatatggacgtaagtgatagcgatgcaaaagtggaactcgcagcttttattcgaatgaatggcgcaatctcgttttcgaatcaattagttataatggatgtccaaacagagaatgcagctatagctagacgaatgtaccaattactaaaagatttgtatgaagtgccaattgaacttctagtacgtcgtaaaatgaaactgaaaaaaaataatgtatatatcgttcgcttaaagtctggcacgcgagggattttagaagatttacgaattcttgaacctccaatgacgtttacgaagtcgattgataggggatttgttaagaagaggagcgccaaacgtgcttatttacgtggagcctttttggcaagtggatcagttaataacccggaaacttcatcgtatcatttagaaattttttctgtttatgaggagcataatgaggcaatttgcgctttaatgaatcaattcgatctcaatgcgcgaacccttgaacgaaaaaacggttttattacctatttgaaagaagcggaaaaaatcacggaatttttaagtattattggtgcaactagtgcgcttcttcattttgaagatgttcggattatgcgcgatatgcggaattcagtgaataggttagttaactgtgaaacagcgaatctcaataaaactattaacgctgctgtaaggcaaattgataacattaagtatatccagtcgacagttggacttgaagctttaccagaacgactgcgtgaaattgccgcgcttcggattgcaaatgaagatgttactttaaaagagttgggtgaaatgctaacaactggtcaagtaagtaaatcaggcattaaccatcgtcttcgcaaactggatcaaattgcagaacgacttagaagcggtgaaactccagcgcaagtagggctaaaagttagcaatagttaattaaaagaaaaggatgcgaattagaatgtcaaaattattttcagaatataaattaaaagatgtaacgctaaaaaacagaattgttatgtcgccaatgtgtatgtattcagtagaaaataaagacgggatcgcaacagactttcattttgcgcattacgtttcaagagcagctggcggtaccggtcttgtaatattagaggctactgcggttcaagaagtaggcagaatttctgaatttgatttaggcttatggaatgacgagcaagtaccagctttaaaacgtctagtagatggacttcattatcacggggcaaaagcaggtattcaattagcacacgctgggcgaaaagctgttttaccaggcgaaattgtagctccttctgcaattccttttgacgaaaaatctgctaaaccggtagaacttacgaaagaagcaattaaagaagttgtcgctgattttaaacgggcggcgtaccgggctaaggaagctggctttgatgtaatcgagattcacgcagcgcacggttatttaattcatcagttcctttccccaatttcaaaccgtcgcgaagataattacggcggacctgctggcaatcgttataaaattttaagtgatattattaaggcggtaaaagaagtatgggatggaccgattattgttcgagtttccgctactgattatgcacatggcggcttgcaattagaagaccacattccttttgccaaatggatgaaagcagatggcgtggaattaattgatgtaagtacaggtggtttagtcaacgtagaaccaccagttttcccggggtatcaagtgccattcgctgatgaaattcgccgcggggctggtattgcaactggagcacttgggctgattacacgaggtgagcaagcagaagaaattttatgcaacgaacgagcagatttaattatcatcggtcgagaattattgcgaaatccttattttgctaaagaggctgctgaaacgttaggtgaaacaatcgaagcgccaaaacaatattcacgagcttggaaataattaataaagcttgaagaccacaacttgtcgtcttcaagcttttttatttaaactgattggatgtaaatgtaatttcaagtaatacaacactaaaaaaatttttacattttaaataaagttatacatatgtggtatatttttcagtgtgtttgtggtagtatgaataatagttttctagttagtttaaaaatacacaaataaattaactgaaaattggaatataagtaggagggatttttatgacgaaagttaattcttttttcagaaaaaagagttttcataacccagcgacagataaacatcatttaaacaaaactttaggcgcatttgatttaacaatgcttggagttggagcggttgttgggggtgggatattcattcttccaggacaggtagcttctgtcatagcgggaccaggaattattatttcatttattattgcaggcattgcttgttgtttggcggctctttgttattcggaattcgcttcaaaactgccagtcgcgggtagcgcttatacatacagctatcacgtatttggagaaggagtagcgtggattcttggctggtcacttattttggaatacggacttgcggtagcagcgattgcaagtggttggtcatcttatatgaagagcttgctagcgggttttgatttacacattccaacagctatatcttccgcttataacccaagcgcaggtacttactttgatttactcgcttttgtagtagttatggttattggaattttacttagttttggtattcgcgaatctacgagagtaaataatataatggtgttagtaaaaattgcagttgttgttttatttattatcgtaggtgcattctatgtgaagccagataattggacgccgtttttaccatttggagtgcaaggtgtaattacgggagcttctacggttttctttgcttatattggttttgatgccgtatctagtgcagcagaagaagtgaaaaatccacaaaaaaatatgccgattgggattatcgcttcattggcagtgtgtacgttgctttatattttattatcagcagttcttaccggcgttgttccgtacactgacttagttggagttagtgcaccagttgcttttgcgcttcaagcgattaatcaaaactggattgcaggcttgctttcagttggagcaattgttggaatgacaacagtagtgcttgttatgtcttacggcggaactagattattgtttgcaatgggacgtgacggactactaccaaaatctttttcaaaaatcagcaagaacgatacgccagttagaaatacgatgatttttgcgacagtaatgggcttgattgcctcaacagtaccaatggaagatttggcacaattaattaatatcggcacgttatttgcttttgcgatggtttcagtcggaattttcttcttacgtcgcaaccctgagcttaatcaaaaaggctttaagacaccattttatccagtggtaccagcactttcgtttttactttgtgtatacttaatgcttaatttatctaaaacaacttggattgcgtttggtgtttggtttgtacttggaattattgtttatacattctatggaagaaaacattctgctttacgtttaaaataaggcaacaaaaaaagtgggcttgtaatttcaagcccactttttttatttaatcagccttttaagccagatttgttaacgatgatgtcatcaattaaaccgtaatcttttgcttcttgagcagtcatgaaattatcacgatcggtatcgcgagcgattacttcataaggttgcccagttttttcagccataatcgtattcatacgttctttgatttttagaatatgacgagcagcaatttcaatttcagttgcttgaccttgagcgccgcctagtggttggtgaatcatgatttctgcatttggtaaagcgaaacgtttaccatttgcaccggctgttaataagaatgagcccatggaagcagccatccccataccgatagtttgcacgtcagctttaacgaaattcattgtgtcgtaaattgccatcccagctgaaatactacctcctggagagttgatatataagaaaatatctttttcaggatcttgtgcatctaagaataataattgggaaacaattgagttagcaacattatcatcaattgcagagcctaacataataattctgtcttttaataaacgagaataaatgtcgtatgcgcgttcaccgcggctagtttgttcaattactgttggaattaagttcatatcaagattcctcctgttaaattgtatattttaatttagctttgtttatatcatacacgaatggtcaaattaggtcaaatgataaagtttggagcaaactatttttaaaaaaattaacaaaaaggtataatgaactatactgaaaggaaggtgcaccatgaataaattttcaaaaattggaatgttttttgttgttgcaatattatctgtcgtgcttttcgaaacaaatgcctctgctcacggatacatatctaaaccagcgagtcgggtatatttagctaatcaagggattaatacgggagttggggcagcacagtacgagccacaaagcgtagaagcaccaaaaggttttccagcaagtggccctgttgatggcaaaattgcaggcggaggaaaatactcactgttagatgctcaaacacaagatcgatgggcaaaagtagatgtagaatcaggcccattaactgtagaatggactttaacagcgccacatagaacaagtagttgggattattttattaccaaaaaaggttgggatccaaataaacctttaacacgagccgactttgaaccattagcgacaattacagctgatggtagcgtaccagatagattatcaaaacaagaaataactattccaaatgatcgttctggttattatgttatcttaggtgtttggtcaattgcggacactggaaatgcattttaccaagttatcgacgcaaacatcattaattctgatattgaaccagttttagacaatgaagcacctactgaaccgactaatttaacaggaacaaccactgctaaaaaagtaagtttaacatggactgcttctaaggataacgtaggaattaaaggatatgaaattttacgtgatggaaaagtaatcggggaaagtcaagttgccgcatacgaagatacaactgtaaaagacaatacaacctatacgtatacagtgcgcgcaaaagatttttctggtaatacatcttcacttagtaatagcgctaaattaacaacgaaagaagcaccagctgttgataacgaagctccaacagcaccaaaaggtttaatgtcacatgcacaaacagacactactattgcactttgttggcaagcctcaacggacaatgttgaagtgaaaaattatgaactatatcgaaataatacgaaaatcgcaacaacgacttccacgatgtttgaagatacaaagctagcaagtgatacaagttatagctacaaagtatatgcagttgatacatcaggtaatcgttcactagtaagtaacgaaatcacagccaaaactaaaccactagacccaatgaacacttggaaagctgatcgaatttataatgcaggcgaccaaatttattataatgggatagcttacacagcgaaatggtggactaaaggtaacgcaccagatacgagcgatgtatggaaatcaaacagcaccgaattgccagtttggaacacccaaaaagcctataatggcggagaaaaagtttcatacaatggtaaaatctaccaagcaaaatggtgggtacgaggtgaaaaaccagatagttcatctatttggatagtggtaaattaactattgaagccagcaaatctcaggatgcgctggcttcttcattcaaaataaagcttgtaaaaacatacgaatttcgctataattattattcgtacggtaaacattttctttgtacataaagccctcgtggtgcaacggatagcacgtaagattccggttcttaaaatgggggttcgattccctccgagggcattaagtagtgatgtaaagaaatctctaaaacgttggaaatccttgatattaaaggataaacgaatgttttagagatttttttataccttgcaatacccgttttattccgttgtttttgtggcatttgtggcaaattttgtggtattttcatctgtttttagtgtgaaaaaagcatctactttagattgattttgttgtcgtaaattagaactcagatgactataatattttaatgttgtattaatatcatcatgaccaagcctgtcagctacataaataatatccataccagcctctacacatagacctgtgtgcgtgtgtcgaagcttgtgtaatgttactgtttcagaattaattgtagtacatattttcttcagtgctttgttacatgaagcgttgtcaacaggtttattgtgataagtaatgaataacaacatcaccggattttcaattgcatgctctttcatataatcagcatgccaagcaaggtaagactgtaaatattgaacagttgaattatcaatatagattactcgtgacttttttgttttagtgtccgtaaacgtgttagtgtatttataatcccatgccttattcactgatatagaacgtttagtaaaattaatatctttttttgtcagtgcaataatttcttcaaatcgcattcctgtttgaactgctaaaaaaataactgctcttgatatagaatgaagttttgcaagctcttctaataatagatgtactttatctgtttctaaatattgcgcttttgtttttgctatatcatgaccgcttatgtgagcgcccagagcagggttttttttcatgtaacctaaatggacggctttattgaaaatcgctctaattttgcggtgtctggtatctatagtagcgacagcgtaatctaatgctaaatgattaataaattgctgatattgaacagcgtcaattgaatttaactttattttttcgtcgaaataattaacgaactgattataagctaagtcatacaagttaattgttgattgactacttttattttctttgaaagttttcataaatagcgaatagaattctttgaaattccattcttttagtgaattactatcatgttcaacttgttttaataattttgatgctttgtacatcaaatttgtttcacttgtatctgtcaaacgtttttctttccactctccatcaactttaatacgcaaacgaacagtatatttaccatttttcattttttttattttcattaatactatcacctctctgatttagaacgtatgttcttttgaagggtacagcaaattatgttaaaatgaatttgcatactcctatgtgtgtatttaaaacgcttattcctgtgcggggagggcgttttttgttatttattctttatttcatatttcgctgtcttgtatgtgattattttcccggtttctttatcattatcaaattgggctacttttacttcgtgttctcctgtttcatactcacttgttgttaaatctaatgaagtttgtgtgtccgcaagttgttctttagtattaagaacatcatcaatataaacatatgttaatttagaaccatcaaattcccatgcttcgaatccgatagatggcgtcaataagtcatcttctttatacataaatggaatatttccatcttcagatgatcccgattctgttttcagaataatctctccttgacctaattctttgtctggaaattcgacacttgttttcttttcaaccttttttacatcttcttttttagaatcacttgtctcgttttcagagttactactcccacatgctgatagaccaaaactaaaaataagtaataaactcgctaacaaaaataattttttcatctcaattctccctttatcaattttttatataaacacatttgtgcaaatatctaacaagcaataatctgtatactacttctaaaaatgataacatatccgttacactcaacagtgttaccgtatttacctttataatattctatagaatgttttaaaaaatcttctgtcacttctaaaaaatctgcgacttcgtagtaatcagtgaatccttcataataagcatctatgattttacgcaaagggacaagcgcttcataaccccaactccttgcaagcttttcctgttttctattattaactgtattttgattaataatatttccaactgttaatttatgatgtccaatttcctccgctaaagtgcaacgcatttcaacatcattttgttgaggatttacgaatattctactattataatataatcctttgtgaacttcctgcatatttttgtcttcaatgatagttagttcaggatatcgctctctgtatttatctaaccacataaatccatctcatttcttatttatatttttgttgaatgaaatcaatatactcaagaatttttttcatatcttcttctgttgccgcgggatcaatgtgagcggctagtgttgtcgcttccggagggatgtcggagtcaatttgcggattgtcggttcttcctaataagtagtcaattgatacattgaaatagtcggctactttttgaagtttgtctaaagctggtttttgagttttccacctgtatatagagttttcacccatttctaattcgctagtcaattgtgaaattgttattcctttcttagcagaaagtttttttattcgttcaaacgtagtcatatcaatacctcacagcattattgaatacaaactaccaaaaaaggttgtaaaaatactttacaactaccataagtggtggtaagatatattcataagctaattatttagctaaacaagacaacaaataaccccataaaaatactcgttccccaacgattaatggcttttgataggcttatttagctatgggtatatactatcactattggttgtttttgtcaacatcatgctaaataattagctaataagatagaaaggagtgatggagaggtgaacaaaagatatttaaaaagaaaaaaaaccaacattcaacaaattgaagtcggtctttacaaaaattatgaaattaaagctaagtatggagcaccggaaattgacctaatcaaagttaaaagaattgtcatagtcttctaaaataatttaacgcctcatctaaatcctcttggaagccaggagtaccaatattagaaaaataatccctgatttcatcttcgcttttgctttctgttgggaaattaccatctagttgaacatcatgagctagatcgcctaaaggactattttcgctaaggtaataagttattaaaaaatcataaaaagtcatctgcaatcacctccaatcaaaaataattatatcacgtgaaaaccaaaacaagaaaggagcaaaaacatgtcagtagaacatcagcgtttcgctgttgcggtatacgcaaagttaaaagctataaatatgaaacaatctgatttagcaaaaatgctaggaattagcaatccttatttatcagacatcataaacggcaaaagagacgcatcgaaagttagaaaagaaattgcggaaattttagaaatagatgttgattaaaatagaaaggagaataagaaaatgggtcgtcctgtgaaaaataaaaacaggcatgtgaatttcctgtacggagtttggacgttagaagattttgcgcaagctagtccacgaagttacgggtggtggttagataacattaaagactttccagagcttgcagaatttagtaactgggctacaaagaatcaacgtgaagcgtgggcattcgatgcagtaaaagcaaatgattggctgattaaaaaatttgtatataaggaggtctgaaaatgattgatgaagtcgaaatactacttgccaaaatacgaaaatacgacccaaattacgttccgaaatcggttggaaaatatttgctagttgaacttcaatcaaggcatttagatcatcaaattaaatataagaaaagacctaagtacaagcataggttcgcgaattcgattgagcggcattggtaaaagaaaaacccacagctataaatagtaagttagagcttactaaaactgtgagttacgaaataatatttgtattaattataacatagaaacggagaaatgagaatgaagaaattcataagtgagcatgaaaataaaatattactttttctgttttgtttccaaatcggagcattactgtcagtcacatatattgtagcggagtggattaaaatattcttgaaatgaggtttttgaatgaagttattacgattttttgggctaataagtattgatgaaaacggaaatgaatatattgaaaaatcagatagatacacattggtttgtttagctttgactgtattaatcgcacttgttgtaggaatcggtggattgatactaaatggctaaattaataatgattgttgctttgatacttctattaatgctgcttgcaaggagtgatagagaatgaatgtagaaaatccgctggtagtagacgatttgtgggacgatggatttcgacactgaggaatgaggcgaagacatgaaaacaatcgcaaatgagtataaagaatacattaacgagcacattttagagcaagcggaaaatgaccaattcggaattcaacaaactatttataaatttgataacgattatggcgctagtgtaatcaaggaatatatgggtcctggcgtagaacttgcggttattcaatttataaatgacaaaaattgggagctggaatacagcacatctgtaacaaacgatgttcttagaaatttaacacatgaacaactgattgaaaagctagaagagattaagaatttatgagttatgaaggaggtgcaagcgtgacattaacaacggaaacaattaataatttaatcggaataaaagaatcatatcaagcatctgatgcgctaatgaaaattttgtttgatagagaaaaacgagaagagatatttaaacagtttttacaacatgatacgcatttagaaaaagattggtttcacgtctattttgaagaagagcatgcgaataaaaagaaatatgcacaagattttacaccaactgaattaagtagtgttgcatcgcaattagtaagaggattaacagacagtcagggaggaacaagactagatgttgccgctggtacgggtagtttaacgatttgcaaatggtatgaagattgcctaaaatattcgccgtttgattatctaccatctatgtatttgtatcaatgtgaagaattatcagatcgtgcgttacctttccttcttttcaatttattaattagaggaatgaacgcaacagttattcacggtgatgcgctaacaagagaagcgaaacaagtgtatttcattcaaaacgataaagacgatttattaaattttagttctttcaacatcatgatccacagtgaaacagtagagaaggaatttaatattcataaatggctagaaccagttatcgaacatatagaaagccctctttcagtagctgatagatatttaaatgagttagaaatagaggacgaagaagcatcacaattgaaacttttttaggagggagaacatgactaagaagcaaaaagaaatactattttgtgactactttgaagagtgggtcgaagtgtataaagtgggagcaattgcaaaaataacactagctaaatactataatgcagcaaaacaacttcgagatttatgcccaaaactttttatctcagattttgacagacgagaatatcaacgaattattaatgtttatgctgaaacacatgagaaacagaccgtaaaagactttcatcatcatgtgaaagcgtgcattaaagatttgtttcacgatggattaatagataaagacccaacatatcgagtggttatcaaaggcgcagaaccgacacgagcgaaaaaacggaaattcttacagaaagaggagttatcgaagttattacaatcactcgatatgagccaaattggatttggatggttcgtaatgctcgtagctaagaccggaatgcgctatgcagaagctttagctatcactccagcagattttgattggacagcacagactatatctatcaacaaaacatgggattacaaatataacaagggatttgctaaaacgaaaacattgtcgtcagtaaggaccattaaaattgattggcagattgtcggacagttcaaaccgcttataaaagattttccagaagacgaacccattttcgttgaaaaatttggagacggcacttacaaacgtcaattcaattcaaccatcaacaattttttagctgttaaatgcaatgaaacaggcattacacagattagctttcacgcattacggcatacgcatgcaagtgtattgttggcagaaggtgtttcgattcatacgatttcagcacgattaggacatgctgacgtaggtgtcacacaagaaacttatgcgcatgtgttagacgaattacaaaagaaagatgatcaaaaaatgttatctgttttgatgcagattgcttagtgaggtgattagatgcgaaaaaattggacggatgaggaaatcagagttttacagaataattacgaatacgtagacactgaaataatagctaattttttaaatcgctcttatcattcaataaaaaacaaagcggtgcgacttggaatcagtaaaaactcggtgtggacagaagatgaggatatttatttagagtattttgtttatgaaacgacgacaatattagcaaagctgccgaatttttaggacgtacaaaagatgcagttataaacagactagcgaagttaagaaaaagagattcttcagtttcttttattaggcgtccgtggaccaaaaaagaagatgagatactaaaaaataattatattattatgtcgaatgaccaattagctgaacgattaagaagaacaaaagcctctgtagcggcaagaaaggtactgttaggactgacaaacaaacacatgtctaaaaaagatgacaaaatgattcgtcatcttggaaatcaagggtacacaatcaaagagatttcagcagaaatgaatttgccttattgtttaattaaaaactatataagaaatcacagaatcaattatagaagggaatcaaaaaacgagatgaacggttggcgaaaagaagcagatgcgacatattcgcattatattaactctaaaaaaatcaaggaggaacaagcatgaatttaaaagtaggagaaagagtagaactcattgctgaatttgaagtggagggtgaggcgtgatgacagtagccgagttaatagagaaactaaaagaacttccagcaaatgcagatattttgctaaccatcggatggaatcactcggaaatagaagaagtaggctgtatcgaaaatgaacgtaacgtttatataagcggctggtgaagtggagggtgaagaagaatgagatcatttgatgtttctacttatttcaaatcttttgtggatgatgataaggaagcgttggaattgttgaatgaatacatcatcagaaataataaaagaccagtttccgtgcagtttcaagtagtacattatcctgaggcaaatcgtgatagagtttatatctttgctgaatttgaattggagggacgatagcatgagagaagtaatccttttaaaaagagaagagtactacgaagaagaaatagacatcagaacatcatatcgttataaagaaacaaacgaaatagcatactttcacgaatttgtaactatccaagaaacaatagctggtgaatcgggcgtatatgctgttttagaaaaagataatggcgagtgtggattgtacggactatctgaattttgacgaaagaaccgaaaaaaaacatgtttctaacaaggagcaatcacaaaatttcagagtaaaattcacagagaaagaaattaaaaatatgaacataaattattgggcatttagagtgcctgttgaagatttggaggagacaaaatgacactcaattcttatttccgaagaaagagcagtcgagtatatggtgatttgctgttcacatacgacgggaaatatgaaaaatgccatggcaaagataagaaagcaagacgtaaatatgaacgattgttgcgtaaaagagatgtggaaaaagaggtggcgaaacaatgaacatacaagtaggaagcaaagtaaaaacaacatacaaaacaaagtttgttaaaaaaggtgagtacggaacagttaaagaaatatatgatgttgcgaacattccagttacagcattagtagcttttacgcattcggcggtttgttactttgtaagagatttagagttggtagaataacattcaaaatcaatccaaaaatagaactcgcaaatataaacacgtgcgagttatgtcacggaattggaattgtaaaaatgttcgttggttacgcaagatacgatgccaattcactgaaaaaagaacaatatgtaaaatgtccgaaatgtcagggagtagaacaaaaatgacaggaatgaaacaagcaccaatccatataaaattctatgtataatttacggcgtgttgacttacgggaaaaaattcctgatagctctaaaaagtataactgggagttagaaagtcggtttgaattagttatggagtaaatgagatggaaatactctgggatattctcagaacggcagactttaatagtttgaaggaggaaaagtgaatgatgaatcgtgtcgtgctcgtaggacgtttaactaaagatccagagctaagatatacgccagcgggtgtagcagttgcgacttttacacttgctgtcaatcgaccttttaaaaacgggcaaggagaacaagaagctgattttattcaatgtgttgtttggcgtaaaccagcagaaaacgtcgctaatttcttaaaaaaaggaagcttggcaggcgttgatggacgcgtacaaactcgtaattacgaaggtaacgatggtaagcgtgtttatgtgacggaaatagtggctgaatcagttcaatttttagagtctaagcaaaacggcgcaggaggctctacatcgaataataatcagagcgagactaattattcaaatgacaataaaacaagctcatatcgagctgataggagccagaatggtgattcatttgcgaatgaaggtgcgccggttgatatcaatccggacgacttgccattttaaaaaatgagagggggagcgaaaatgccagcgataaaagcaattaaaaagttgcgaaatagatcaatgagcattaggcagatggctaacgcgattgcagaggtaactagctacaaaattaatgaaatcgaacaaatgggggacgaagaaattgaggcaaagtataccgcgttcgtcattaacgaggcgaacgaatacgcgaagtaaatacaatgcgaagaaagtagttattgacaatataaagttcgatagcaaagcagaagcagcgtattatcagcaattgaaactattaaaattgactggtgaagtaaccagtttcgatttacaaccagaattcacattacaagactcgtttagaaaaaacggaaaactgtatcgagcgattaaatataaagctgattttctcgttcgatacagcgatggacatgaggaattaatcgacatcaaaggcatgttaacaaaagagtttcgaatcaagcaaaaacttttcgaaatgcggtatatgcaatcaattaaatgtttgaaactaaaaggcaaacaattcatggaggtgtgagagatggcggtaatggaagtaacagagaacaaggctaggcagcgggagattattagttatattacaaataatgatttacctcataacgagctaaaagagctacaacgtgagctaaatcaattgatgaacaggaacacagaggaaaagaagaaaaacttttggaataaaacgataaaaaggtttattgggaacaaacaatggaacgacattacagtagctgaattcgttgaaataagacacgcaggcgtaccgggagacgcgattgcggattattttaaaatagctagatcgacaatatttaatttcacacaaagaaacaaagaagaatatcatcgcagatttaacacagggatttatcacaaaagtaaagaattctggaatgactaaaaggggaatttgttttaaattgttggacgggggcgactttatgaaaaaagaagatggcgtttatataatctctaaaggagaagaaacatatattaaaccgccaaaaaatggcttcggacaaactaccatcgcatggagccacggcaaacctaccactgccgagaacaaggaaacaataaaactaaataacaaatagtctgatcgaaaaaatcgaaggacgtcatgaacagttaaatctgtcgtgacgtcctttttttattaatcattggggagagtgacgagaatgcaagaattaattaatgagtacagaggagctttacaggaagtgaacgaagtaaaagctaatttgcaaaccaaaattgacgcaaaaaaacgtcctccgcaagcagcggggcaaaaaagaactattcaagaagttccggaaaaggcgattatgtcgaaattaaacagtattatccgcagcttagagtattcgattgagtggatggaattaggacatgaaccagcgccacggagagctattcacagacgttctggacttcaaagggaagtatgtgttacagatattgaaactatgcgtcaatggttcgtatatgagcatggtatcgcatatgactttgaagataatgagccaaagatttcggaatgggacaaaattcggatggaagacgcaatgtccacgatgtcaacacaagaaaagaaagtatttttgttaaaacatgaaaaaaatttatcgtattcacaaattagcgatgagatggagataagcgttcgttctgtacgatcttatctacatcgtggggaagaaaaaatacagaatcaaattgacggtagcttattttgcatggcaatttagtaatttttgccgcacacctgccacctatatatgagaagtgaagatgattacaaaaataaatcatatattgagtctgcgctccacttctcatttataaaaaatactcgtggcgaaataggtaaccgcatcagtaatgttctacaagaagtcatgcacactcgttatagactctagcatctggcgtgtgtgtaaatagaaactacgctagtaaactgttgacttcctgcaaggtgcaaatccttgccgagtatattataaaaaacgaagaaggagttaattacatgagagacattataaaagcggggataactgaggtaaaaggaaaagagccggaattcaaaataaatattgctggttcagaacaagaacaaagttttgcattagcccagattcattacatgaaaatagagcggttagctatgctaaatggtaagacttttgaacaagctaagagtgattatttagaagctctaagcatcattgtaggagcaattaaagataataattaattagcaaaacaaacacagaatgtgaggtggtggaagtgagtggctagagcaagaaatccaaatagagacatagcaaagaaaatgtggcttgattcagataagacaatgccacttgtggaaattgccagtaagttaaattgtaaaccatcacagattaggaaatggaaatcggaagataactggagtgataacgccaatagtaacgttacgaatcaaaaggagcgttactattcaatgaaagggaacgggaatgctaagaacaataaaggcggcgccgctcctaaaggtaatcaaaacgcacgtacacatggattgtactctaaatatcttccggatgacacaatagaaattattagtatgatggatcaacaagaaccaactgatttaatttggggacagatacaaattcaatacgccgctattatccgagcacagaaaattatgtgggtagaaaacaccgaggatgaaacgagagttcaaacacaagttggattcggggaaagtggttctgataaatatgagtatcaattcgcttgggacaaacaggcgaattttttaaatgcacaaagtcgtgcgatgtctacactaagtgggttgattaagcaatttattgcgattgctgatgagcatgatgaacgcaaggctaagcttaatcaaattattgcatcaacagataatatacaggcccgcacagctcttattaaaggcgctgaaaaagatactacattgcttaataaactattagatgttgccaaaggaggaaacggagaccttgagtaaaattgatgagctagtatttacgccaaagcaacaggatactattacattcccttttcaaaatgtaactcttgaagtcaacgagggaactcctcgatcaggaaaaaccacagcagacatctttaaaatggcttatatatactctatttcagaagaccagaatcatttagtcactgcttacaatcaagaacaagcttttcgactgtttatggacggtgacggctttggattgatgcacatatttggtaatcttgcagaaatgaaacatgatgaacatggcgatcatcttcttatacattctccgaatgggccaaagaaaatttactataaaggcggcgggaagatcaatagtgttggcgctattactggtatgtcactgggaaccgttacatttttagaaattaatttactccataaagattttatcgaagaatgctttcgacgaacttttgcagcaaagaatagatttcatttagcagaattaaatccaccggcacccaatcatccagtgttagaaatcttttcgcagtatgagaagtctgggcgttacaaatggaggcattggaccgctaaagacaatccggctctttcagacgaacgcaagcaagaaatatataacgaggtcaaacattcggcgtatttgttgcaacgtgattggtatgggaaaagagttttaccagcaggcatcatttatgaaacgtttgacgttgaagcgaatcaaattaaaaaaatgcaaggccatccaatcgaaatggtcttttttggtgatggaggtcaacaagatgcgactgtttgcgagtgctatgtaatcacagaacacgaagcggaaggcggatacacttacaacctcaatcaagttgccacctactatcacagcgggcgtgacacagggcaagtgaaagccggctctacttatgccattgagataaaacaatttattcaatggtgtatgaaagagtatgaagtaccagtaaatgagcctgtttttattgaccctgcctgtcgctggctacgtgaagaactggaaaaggttggtgttgatacagcaggagcagacaacaatgctcatgatgtgacaggtaaagcgcaaggtatagaggttggaattgagcggatgcagtcgctattaagcgaaaggcgttatttgcttgttgaacaacctaacgatcaatatgaccattacagttggctacaagaaattggtatgtatgtacgcgacgagaacagcggaaaaccagttgacaagaataatcacgcgatggatacaagtagatacgctacaaactacttttataggaattatgaagatatatagaaaggagtgattaaatgggtgtttggagtgtaatgacacgctttattaaaggttggctaaatggaaaacctaacggcagcgaaccggagttaataccaaaatatctgccgctcattccagataatcaaaaagaatggagcaaagactcctatttaacttcgttgtgggctcaaggatatgtgccaacagtacacgataagttaatgaattccggaacaggcaatgagatagttgttgttgcggctgagtatatatctggaaagcctttaagtattgatgtaacagggggtaatggcagtaaggatgaaaacttaacaaagcaactgaaagaagcattacggattgataattttgatagtaagagtgtgaaaattgttgaattagcaggggggagcggagtatccgctgtaaagattaacattttaaatgggcgaccatctattagcgttcatagctctagccaattttggatagattttaaaaacaatgagccatttcgttttaatttctttgaggaaatacccacaagtaataaagcagatatttattatttagttgaaagcagagaaataaaacaatgggacaaggaagggaaaaaattatctggaggttttgtaacatattctgttattaaaatcgatggcgataaaactactcctatcagtgcggaaagactaccagaacagattacaagctatctgtacacaaatgatattcaattgaatcattctgtatcaattggtttaaagagcttgggcgcttatttaataaataatagcccaagcaatactagatacccacatcttaatcttggggaatcggacttatcacaatgtaccaattatttatttgccgtagattactttttcactgtttatatgcgtgaaggagagaaaacaaaaacaaaaatagcagctagcgaacgaatgtttaggaaaaaagttaataagagcacagataaagaagaatggtccatgaatgtagatgaagactactttatgcagtttaaagggacgttggatgctggtgcgaagttaaatgacatgattcaattcatgcaaggagacttccgagatggtagttatcgcgaaacaatggaatattttgctcagaaagctgtttcgaaatctggttacaatcccgctactttcaatttaggaaaccgagaagtgaaagcgaccgaaatttggagtttgcaggacgcgacagtgcgtaaaattgagaagaaaaaacgccttattcaaaatgtttatgagcaaatgttgtgggactatctatatttattaactagcggtgctaaaaataaagaaaaagcaataatgcgtgatgaaaccagggtaataattgagtttccggacccaatgacggttaatttgaatgaactttctagtactttaaacaatatgaacagcgcattagcgatgagtgtagaagaaaaggtgaaattaatccacccaaaatgggaagatgaagaggttcaagcggaagtaaaacgtatctatttagaaaactcgattggagagtttccggacccagaagcaattgggggaatggaaacgaaaggcgggtgattagatgagtcatcaccatgcaccagtggatttcgaaaaagaagcatctatcttacgaaaccactttaataatgccgaaatagacttacttttgctgataaagaagcatgttatgtatggcgctaagaatccaacaaaatggaaattcattcagcagtcgcgtttgataaggtttaaaagagaattgaaagcacatataagtcttttcaaagacgaaacgagaaataaaatagataaactaacgtatcgtgtttatcttgattgcgtgaatgaatacgaggacgaaatggaagccagatatcaaactaagaaagaggttgatatacaaaatgacgactatttatctgaaagtgatgcacttatccaaatttcggaagatatggctaattattggcaaaaaatcgcgccctccaagtacaaacaagtggttaaggaaacaaaagatagcaatggagttttaaaatatgctatcgcaacatcacttattaatgttttaggtgatggcataagaaatgttatagatcagtctggaagaaagtaccggccaggagcttacatggaaatggcttcaagaggtgctttttttaatgttggtttgaatgccatgaaacgtgttcttggaagatatgagcacgaattagttcaagtatcagctcacgtgagaagttgtccgcgttgtgctccttggcaaggagaggtgctatcagttaactatgaaagcaatgaatataaaacgttacaagaagcagaaaatgatggcttgtttcatccaaattgccaccattttttatattcgtatttcgaaggtgacgaaacagacgagcctatcccatatgatgaagaagaatacgaagcgcaaagtaagcaacggtactacgagcgcggcattcgtgattggaaaacaaaagatatacttgcagaaggtccctctaaacaatatacagctggaaaagtaaaacaatgggaagaagctttgcaagagcatctaaataacaatcgcttcttagagagagaatcggatagagaaattataaaagcgtctaaatgaacgctttttttgttgggctttataaaaaatcttgcctacctgccggcaactaatagacagggatggctcactcagagcttaaaaaggaggaaatatgaagaattatttacaacgcaagtttgacatccaacattttgctgaaggtggagacgataagaaattttcccaagcagagctggatgagattgtaaaaaatcgtgtagcagctgaaaaacggaaatttagtggagagattgaaaccatcaaaagcgcgcatgaggatgaaatcaggaagctaaaccaccaaatcaatcagcttaacgatcaagtgggcgaacatgattcatctgaaaaggcattgaaaaaacttcaaaaagagaaagacgaggcactatcaaagctggatgaatatgttcagaaagaacaaaccgcagagtggcacaacaagctaaaagaaagcggcgtaaaagaagaacgctatgaagcgtttacgaagctttttggggatgaagagcgaaatgacgacaacttagcgaaattcgcagagcaatatcctgaatggattgcaaaatctgatgatggtgacacgcctccaccaatcggggcaggactaggcaatgcaagtgagccaagtgctacagacccattcattcaagcattaaattcataattagaaaaggagagatagcaaaatggctattaactatgtagacaagtacggtaaggagctcgaccagaaattagtcttcggcacttacacaaatgaattagaaacacctaaccttttatggttagacgcaaaaacatttaaattacaaacaatttcaacaactggattaaaaccgcacactagaaacaaaggatataacgaaggttcagcatcaaatacgaatactccatacactattacgtttgatagagatgtagagttttttgtagatgttatggatgtagatgaaacaggccaagcgttaacagctgccaacgtaacaaaagagtttaatgcggaacacgctgcaccagaagttgatgcatatcgtttttctaagttagcaacagcggctaaaaccaatgggcactctgctgcagaaacaatcactgaagaaaatgtctttcgtacacttaaagcagctattcgaaaagttaaaaaatatggtacacaaaatcttgttatgtatgtgtcaccagacgtaatggctgcattagaactaagtaaagactttactagaacaatctctaatcaaaatattgggccttctagcttagaaacacgcatcacaggaattgatggagttaaacttgttgaagttgaagcagaagatcgtttctatgatacttttgatttcacggatggttataaaccagcagctggagctaagaaacttaattatttactaattaataaaggttctgttatcggcgggactaaacatgcttctatttaccttcacgcaccaggttcggtcggacaaggtgacggatggttatatcaatatcgtgtataccatgatatttttgtaaaagaacaacaaaaagacggggttatcgcctctacagtggcttaaggaggagttttttgtgcaattaagaaaagataatgcagtatacaataccgacaatgaagtattaattaagcagttagaaaacgatggctttgaagagttcgtgtataaagaaccagaaaaagaaccatccaagagcaaaaaggagcccaaaaacaaagagggtgagtaaatgaaaacgtatattacaccaagtgagttagctagtctaacaaacttaagtatcgaaccaacagaagcggataatttaataaaagccgcttctgtagcaattgataagcaaattatgcctaatatcgtagaccgagataatgtggatgatgatattaagcaagctgtcgcatggcagtgtgagcatatcaagaaatatggtggatttattggtattggtaactttacactaggtaaattaactatgggtggtcaatcacaaaactcgaacaactttatacctgacgttccggacaaagttatggatttgcttttatctagtggctggctttatgcgggagtaggtggctgttaatgagctttcagttaccgcctattcccgaggctatactaaatacggaagttacaataattagtaatagtggacgtgatgactttgggaaccttttaccagatacaattaataaatcgatgtttcgctatgagtttgaaaagctcgtaaataaaacagaggaaggattaaacataagatatattgttaacttattttgtaacaaattaagttttgttgtgaatgaaggagacaatgtatcttttgttattcctggctattgtttaattaaaggtgaggttcagagcgtatccttcccgccaaatcccgatggcagtatacaccattttgaaattgtcgtaggagaggtgaccgagcatgagctttagtagttttaaagatacagtcatagatgatattcataataaagctttgtcaacggctgcaaaggctggggaagaattggttgaattagcacagcctgttactccgattttgtatggagacttgcgacgaagttcggcttttaaaattatcatccaaaaaaattcaattgtagctagagtgtttagtttaactccttatgcccgcagacaatattatgaaaatcgtcggaatccacgttggtacgaaatggctgtaagttatggaattcagagtattaaccaaattgtagaaggtgggatgcgcttatgattgaggatttagtagtgcatttcaaaaaaacattcccagatataaaaacacttggattcattaaacaaacagggcttgattcaatggtagtaattaatgaagcaccgacatttcaaaacaagcaagtacaaacgcaaagtcgtgttcgtgagagcatcggctttttaatttatgacaaaaacacaattcaatgcaaacgaacatacgatttattacgtaactactttcttttaacaaacccttctgagctgaatatccaaaatcagaaggtagtagcaacagatgtagcaagcggcggacaagtcgattatgacgatgatggtcgcttgatttaccaactaacaatattatttgaaaaggagatgtaagttaatggcaacttatgcagttaaacaattagaaatttcggttaaagattcaggggaaagcggagatggtgtttcgatcaaagacttagaaactttagacatttcactgaactcaaatgtggaacaatatacaacaattggtgaggtatttgaacgtgcggtaaaaacaggtgctgctatggagttaggtttggatgggaaatacaatgaatcagatccagggcaaaatgaattacgtgaaacttgggataaagttgggtctgaagctgaaaaaacaattgtggttaaattcccagcaggctctaagtatgaaatcactggaccaatcgggattaatgatttcggtggtggtggtgcgaacgatattggttcattttctgccacacagaattcaaatggtacgccggtttttacgccggcgcctaccattgagccaacaagcgtaacggtagatagcgcctctaaaactgtaaaagttggagaaactattaaaattacagcaggagtactgccatcaggagctccacaagatgtaacattcacttcatctgatgaagcaaaagcaacagtagctagtgatggaactttaacaggagttgcaaaaacaacgagtgctatcacagttaaagttaagacagttagcaagccttctattttcaaagatgtttcagtaactgtaacggatgcttaaaaatacgaagccctctgagtgagggcttttactaatttggaggacaaaaatgaaatcatttaattttaacgagaatgaagtaaaacttcctttggaaattaacgggaaaaagtattatgcggacatttcggcacaagcacacattaagtacagtgcgcttttggatgaagctcccaaaattttaggacaagttcttgcgcctaaactaaaagctgatgaaagtgatgacgaacatacaataccaaataatgaaaacatgcatgaattgttaatgactatcacagatgggatcgtagcgacaaatgatgatatttttgctatttttttcagcaaagaagacagagaagaaatcaattccaaaacattgccaactaaagtctatgaggggcttattgaatacattatagctaaattatttgaaagcgatatgagcgaggaaagtgacgaggggaagccacaggaaaaaagtattacggaatagttgaagactttgatttaatcgagtcttcttttttgtcgtattacggtatcagattgcgcaaagaattgtcaaatatgactttttcagaattccggacatatctaatgaatttaggtggggaaacaccatttatgacaactcttgaaattcgaatgactgaacgaagcaaagtgccaaaacatttgctgaaagaaaaaataaagcaaaatcgaatcatgttaaagcgtggatattttgaggatgctgcttctaatgaagaaggattagaaaaggctttgagagctaacagcaagctgaaagaggggtgaaaacatgagtaaagcaggagaaatttattacgatataaaaatacgcgaaaatggctataaaagccagatgaacaaaatcgataaggatatggataattttgcgaagaaagggcaaaaagcatctgacaatatcgacaaaatcaataagaaaaacattaatgttaaaggtcttgattcatctatcgtcaaagttgaacaattcggaaatatgcttgaaaagtctggtcaaaagttaacaaaagctggaaccgcgatgaccgttggatttacggcgccaattgtagccggaatggtgaaatcaactaaagcgtatcttgattttgataatgaagtgacagaagttaactctttattgcgtgaatctggtgaatcagcgaaagagtttggcgatcgttatacacaagtctttgattatgcacagaaagctagtgttaagtatggggtagcttctgaacaaactatgctcggtatgaaagaaatggttaaaaaaggctacgatattaatcaaacaatggcgtctatgcctgcgatttttaacgctgctcgtgcatctggcgatgatttcgaaacagtaatgtctgttacaacatctacattagaacaatttggaatgatttctaaagacacaaataagcagatggaatacacaaacaaagttgctgacgtgctaacatatgtagctgataaaacagcggctggattctctgatatgggaacagcaatgaactatgtcggtcctatttcgcattcgctaggatattcacttacagatacagcagcagctgttggtttgctttctaaccgcggtattgaagggcaaaaggcgggtaccggcttacgggggatgcttacaagtttgcttaaaccttcaaaatcagctgcagaagcaatgtctgcagttggattaacaattgaagataacaacggcaatatgaaaactttgccaactttgttggatgatattaatgataaaacaaagaaaatgacgaaaacacagaaaaactctttcttgacgatgattttcggacgtgaacctttatcagctgttaatacgcttttggaagcgggaggcgattctctacgtaaatattctaagggcgctgatgaagcaaatggatatactaaacaagttgctgataatatgcgaaaagctggtaaatttggtgtggatcaattcaaagcttcgctcgaagtattagaacagaacgtaggacaaaaattaatgcctgccctcactccaatcatcgagtgggctaataaaatgattgataaatttaatgacctttctggagaacaacaacaaaacattataaaatgggctggaattattgcagcaactggtcctgtattaacggttggcggaaaactagtatcaatgactagcggactaataaaagggttcgcggggctaggtaagatattgggattgggaagtaaattaacttctttggcagctgggtttggggctactacaacagcggtagaaggaactagtttggcagcggcaggattagcgggatcgtttggagcgttgccagctgtcattggtctagcaggcgcagctttacttggtgcagggatctatgcgttagataaacatataagtaaaattgaagagagtaaagaacgtgtgaaaacgtggggctatgacattggcgccgaggcagataagtctatggtgaaatttaatgagtttgcatcggaaggtacactggcattagacacatttgcatcaggagcaacggcagacagcgagaaaattgtcagtgcattcaaaaacatggcggacgaaattaagaagaatacagacgatgcattgggtgacttcaagaaagcatatgatgaagcttcacctgctgtacaagcgttactagacaacgccatgaaagattctgaaaagagagcagaagaaagaaaggcaaacgtagattcgcaatataaagaaatagaaaagatttatcaatctcatgcagttaaaactggcaagatgacatctgaacaatcgaaaattgttaacaatatttacaaagatatgcagattgaacaaattgaaagtttaggcttaagcaacaaaaagaaaacacagctgataaaagcgatgaacggtgaggtacagaatttaagtacaaaagcactcactgaacaagctaactatcttggtaaagtcacaaaagcaacaacagatgagacgaagaagcaaaagaaagcattcaaagaatcttatgataaaggattaatagacaaaacggcatacaataacgcaatgaaccaactggatagagatcagaatggaacagtgcggtctagtgtaacggctttgatacgaacgcaagaacaactatatgataagttaaatgtaagtagtgatgtagctcaaaaaaacatccgacgcggattaaaagatatgggactagattatgacgaatttacacgtgatgtacaagaaaaagcgggcaaagctgacgaagccagcaagctaattggcgatggagcaaaaatggcagataccgcatggaacaacttagtattagaccctaaaacttctgaaataagagacaatgttggtgaattcgtatccaatttagctaaaagtgatgatggttggaataatctgaaattcatcatgaaagaagcaaaattaaccacagatgctaagaaaacaattgcaactgcaactattgaaagtggtcgttgggataagatgactttcaacgaaaagaaattaattgtcagttacgaggactctatacatgtagctaacgcgctgtcagatttaggtatttgggataaattgaagcctgaacaaaaaagtatgattgcgaatgcagatactagccttgcgctacaaaaagcactacaagacatgggtgtctgggacaaattacctccgtccatgaaaactttagtagttgataattctgatgtgttaaaaaagcttaattcatctaaaggaatgattgtggaatacaacggcacaaaagtagatttaaaatcattgctagcaacgaatacagatgttaaaacaaaaatcgagcaaggtaaaaatgtaattgttgagtataacggtcaaaaaataaaccttaaaaatctttatgcgaacaatagggatttattgagtaaggttcaagaaggcaaaaataatatttattcttacaatggtacaaaagtaagcaaaaaaacatttactgcgcttactaatgctgatactgttagagatttacttaataacatgattgcggattgggggaaaatacctcaaagacaacaaaaagttttagaaattgcgtataaaacgaacggtaaaagtcctagtgggattcaagaggtaggttatgcaaaaggtacaaataaccatagtggcggaccagctctggtaaatgatgcaaggggaagtaactacgaagaaatgattactacacctgacggaaaaagctttgttccaaaagggcgtaatgttcttcttgatctaccacgaggcactgaggtattgcgaggggataaaacagctaaagctttgagaaacgtaccacattatgcaaaaggcacatctaaacaaactgcgtatgccaaaaatgtaaataataagattgctaatgtacagacggattataaaacgggggcaattaacgcacaaggatatattaataagcttaagcaaattaataagcaatataccttgaatgaggcacagacacgtaaaataaggactaatatagctgctgcaaataaagaaattagtacgcaaaaaactaagcttaatcaagcagttaagtcatctacacaaaagtactatgataacgtgaaaaaagctaacgatgaagcaaaagcaagcataagcgaagctaagaagacatataacgatgctttaaaagctaatcaagaaagcgcttatagccaaataagtttatttgatagggccaaaacagataaatacgctggtagtgatttattagcaaatttgaggacccagacacagcaacaagatgaatttatcgctttaataaataaactaaaaaaacgtaaagttaatgatggcttggttaatgaacttagagaacaaggtttaagtgctactggacaaattagcgcaatcgcaaatatgtctgataaagaactccaagcatatcaagctgaatggtctaaaaaacataaaaacgcaaatgctattggattagatggatctaaatctgaaaaggttactatggataaagctattttagcagctaataaaaaagcgactacaaacattgcaagtgcaaaaaatacatggttaaaagagttaggagacgcaaaacaatttaaaactgctggttcaattcttggtactcaaactgttgcagggattataactggttttaaaaacatgaatggtcctttacaaaaagaatcatcaaatatagctaaaacaatcgagaacacaataaaaaaagaactagatattcattcaccttcaagaaaaatggaaaacgaagtaggttttcaagttattgcgggagtcggcgtcggcatgcggaagaatgctaatatcattagcatagaagcagctagaatgagtaaaaatcttactaattcgattccgcgcatcgatgttccagtgacaccaaacactcaagcaataaatgcatatcagtcagatagtaataagttagtgagcaatcaaaaaaacattgttgcaaatacacaacctattcaagtgaatttagtattaccggatgatagcagtacgccagtcgcatcgtggttaataaatgatattgatatgctattaaacgctaaaacaattatatcgagagcgaaggcaggaggttaatagatgtatggactaatatttgagcgacaagatggaacaaagtacatcactagagaaaataaagtcgatgtgaaagaatttaatgttcctggtcccaacttcacaactgaaagagtatccatggaaacatttgacggcgagatagacatgggtagtgttttagcaaagcgggatataacttttcaactaatcttagtatgtagtaattacgctgaatacatcttaaaaagaaacgaattcattaaatttataagtgggaaagaagaaatttatgtcatcgatgaaaggcatgaaacggttcgttggccagtaaaagtagagtctttaaatattcagcaaaagggaggagcaccaatctgtgatatcgcgggaacttttgtttgcgcgcaaggtctttctgaaagtgtaggttctactttagatgggtttaaatttagcaatagaaaatggagcctaggacaaaatttaccatcgtctgaaacagcagaatatgtttttgatacaaacaaatttaaggtatataacgcttcagatatagcaattaatccagaaagatacccttttataattcgctataaaggggcatcagagggactaaggataaataataaaactactggtcaagtatggtcttacaaaggaataacaaagcgtacggatgaattggaaattaatcaagtttactctttgcttaatggagccggtatatatggcgacactgaaaaatcaacaattggtttagcccccggatggaatgagattgaaatcatggggagtacgggtcctttagaaatatcgttcgattttcgtttttattattacatgtaaagaggtggagaaatgttagaagttacagatttatatggtaatagtgaacctcttactaatcatagtattttagaaaataatttcgaaataaatacagtacctgatttaaattttacagtgtatagaaagtataacgaaagagcattcgatatgatcacagaaaaatgtgtgattactgaagtggaaagcaaagaaatgtatagaattgagatgttttcatgcattggttcaggagacacgattggctataatgtacaatgtcttcacattgtaaaggatctaaataataagttactcacttctgaacttaagggaagccaaacaataaagtcgtgtatggactttattgttagtgggacaaaattcacctatgaaattttggactctttttcttcttttgattttgaaagccttggaaatgattttgctttgaatgttcttttaaataatattttagtgaattttaaagcagaattcgaagtgacaaattatcatattgttattcggaaaaaaataggcattgagaatgcatttatatttgtagatgggtttaatataaataaactttcatttacaaatgacagtacaaacctagcaactagaatatctggagatggtaaatcgggagataatggtaatcctattgttacaactacgtatacgagtccgaacgctgatatttatggcattattgacgctgctaagtatagtgatgattctactactacagcaaatttaaaagcaagattaaaagaaacattgcaagatgttccggatatttctattactcttgactatgtgcaatttactaaagggaatattcataagaaaaaagtggagcgtgtcgggctaggaaatgcaggatatgttcgcggaaaaaatattgatgtctatagtagaattcaaaagataacgctttatcctcaatcaactaaaacaccagttgtatcaataaatagtgtgaaagggacattatcgaaaacattggcacatttaaaagaagtaaagaagggggttaaaaaatgagagatttaaatagattagacgatttattgcaaggatatgaatttatgaaaaagataaatgataactgggaaataatcgagaatggattaaatttatctgattatgaaatagaacatctgcgaaaaagaattacaaatttggttattgcatccggtggtaattctagcaatgaagttgttgatttaagggtttctaagttacagaataaaatatttgaattagcgaaagatagattagatagtgacttagattctcttgcagatagtttaaagaacatgatgacgagaataacgagtattgaactaacaaatgagcaagtattatatatgctaaatcgtctgtatggtctggatgctggttcaattgaggtctatgtggattccgtttcaggggatgatactgcagggactggagaaaaaaataagccatttaaaacaattaacaaagctaccatgaatttcccacgtgtatttaatagtaatacattacgcttgtggattaatcctggacgctatgatgaagatgtgattataccgccattatcaggtgtgacattatatattctatcttctaattatgaaacagttgatcctgcggctggtcctactacttgtcaaatcagaagtatttcagtatctgatacatctggatatatttatattgctggaatagaacaaacaaatactgcaggaacaacgaaaaactattttatcaaggctatacgctgcggatttgtaaggattacaaaatgcagaatggctttcaatactaaagcgatagacccgtttacagccgtattcatagatgcttgttctgctgacgttaacggttgttacttcgcttcgcaaaacgtcgatgttcgcggttataacactgcaagagttgaagtgcaaaacaccacacatggagcaaaaagcgcaatcggtttgtatcctcaaagtgccgatattttcaatctcaatagcggtacctgggaagctgacacgcctacgaaactgagcggcgggggagtggttagaacatgactgaaactgaaaacgttattcacaaaaacggcatatatgattttaacgtcacaacgcaagaagataaaccacttcaaaaagctgttttttatacgcaagatacaggcgggacagctagacttatttttaatatagataaagataatcaagatttaggattatcgtctgctgctgaattagagcttgctatgattttagcgaaaggaacagagtcagagagcaagtatcttgtgaaaccaacaatcatcgatggagtgcgaggaattgcagaatacgcacttacagactctcaaatagcgcacgatggaaatgctattgctgaattgtatataaaatacaaaaatagccaagggatgcgtgtgtataaattcagttttgagataaaaaaagcattaatagatagcgactttttcccggtaaaagaatactatgttgaacgttgggatgattatgaaaaaatattcgacgaatcgttcgagagattaaatactaaattagataatgtcgataaaaaagcggatgatttaacaatacaatttgatgctatgcagcccgcacaattcgcacaaaaaacagacttaaatacacatgtaaataatgcggatattcatgtcaccgcagcagataaaactaactggaattcaaaagaaacagcatctagcgcacaggctaaagcagataaagcacttgctgatgcaaaaacttttttcgaactagctagtgcggtgcaaagcgttactttgacgccaaaaaacggatttgttgcaagtcagcctttagtcgctcgatacattaagtttggcaaccggtttctagttattgttagcggaattgtaggaaaagggaccgggaacgggacaggtatatgtgcaacattgccaacttttttagctcctgatgcgagctggaataaactttattccgctgcacagcagagtacagcagcaagtaatcaagcgaatatatatctaagtgtgagtgctgatataaatattgttggtgttggctcggtagacgtgaacactggacttgacggcataatttatttaactaaagaggtgacaacatgagcgagttaataaaagtttttaaatatgatgcagacggtatttttgaacgtgacgacttaattgttttggaaaaaggggaaaaggttccagatggttatacattaattgcgccgccagttccttctgtaaatccagtttttaatgtaaagacccaaaaatggagcgctggtgaagacgcaagtgttatggaccctcctccactatcagaaatagaaaaattaacgcaagattatgctgact

(The sequence listing continues in the following parts.)
